United States Patent Application Publication US 2004/0016025 A1 - sequence listing, part 3

SEQ ID NO: 3914 - DNA, 915 bp, Triticum aestivum
ggattttccttcttatttgacgaagatggtgaagtgggaacaccagtttgctgcccacggttttcctctcctactccctctttcatagatgcctccccggggggaggatcgaggaagaggtcgagcttgaccctgcggcccgaggccgccttggccgccaggcggcgctccttccgcctccccatcgccgctgctcggggcctccctctcagcatttctcctctcaacctgcctctctcctcgtacgtgctacttcttgagttggtaattgatcggtagtcgttcctagctaagctagctagcaatggccgcacggggaggaggcagtgccaacgtggccgtgctccttgccgtgcttcttctctgcactctcgtggcggaggcggcggtgttcaacgtcggcgaccgcggcggctggtccttcaacaccaactcctggcccaccggcaagcgcttcaaggccggcgacgtcctagtgttcaagtacgacgcgacggcgcacgacgtggtggcggtgagcgcggcggggtacaaggcctgcgccaagccggcaaacggcgccaaggtgtacaagtccggtgccgaccgcgtcaccctcgcccgcggcacaaactacttcatctgcagcatccccggacactgccaatccggcatgaagatcgccgtcaccgccgcctagcctcgtccatcgtccatggtgcacgttaattcgtacgcgcgacgttacgtgatacggcgagcgcaacttttaattcctaatgaccaaaataaaaggccgagcgtacgtgcttgggtttttcaagttcttgatcaatgtagcacagtattgattcgtacggtgtgtgtactgtttgatttccactcgaccaatcatacattcatactttctgttgtatggtgccatatgtactgatt

SEQ ID NO: 3915 - DNA, 965 bp, Triticum aestivum
gacggcgccgccgctgaagcgggggccgtggacggcggaggaggacgaggtgctggcgcggttcgtggcgcgggagggggaggggcggtggcgcacgctgccacggcgggcgggcctgctgcgctgcggcaagagctgccgcctgcggtggatgaactacctccggccggacatcaagcgcggccccatcgccgaggacgaggaggacctcatcctccgcctccaccgcgtcctcggcaaccggtggtcgctgatcgccgggaggctgccggggcgcacggacaacgagatcaagaactactggaactcgcacctcagcaagaagctcatcgcccagggcctcgacccgcggacgcacatgccgctcgccgctgctcccggcagggcggcagctcctaccgacaagacgacgtgggcgccgacggtcagaccgccgcacctctgcccccgccagcgcttgtgctgccgacctcgtctgccgctggaactgacgcgacggccgtgacagcccaggcgacggaggcatgacgacctcgccgcggcgatgagcgtcgacgcccatgacttcgaaggtttcggtgatcagcttctcgccgactacgctgcttcccgcggagtcttcaacgacgtgatggggtgtccaatggtggacgacgacaccttcacctcgttcctcgattccttgatgaatgagcgccagttggctgctgatcacaaggttggcgctatctagctgatgcagatttacaatgcactgtagtaatcgcgaatcagctgactagcgaaataagttgattgatgatgggcagatagtacaactgcgtacacatgaattgcttaatgtgatgaaggggtctggtgacgtttgtttgtgactttgtgtgatgaatatcagtactacgaggatgtaatgtaatgtatggattgcacagacataagatttgtagaaggtccgcaattaatca

SEQ ID NO: 3916 - DNA, 713 bp, Triticum aestivum
gacaagagagagaccagggagagaggaaaaaaaagaggctcagcagcggcggcgatggcgagcggcggcggccccgatgacgaagaaggagctcggcgagacccacgacgtcctccgcttcggcgtcaacgacagcgtccgcggcgacctcgcgccggcgcaccccgtccaggccaccatccacaaggaggccaagttctgggaggagaagaagaagttcgggacggaggccatctacggatccgccttcaacatccgcagggatctcgacgcccagatcctctccaggttccaaaggcccccaggtgcattgccatcatttatgctaggatatgaggcgatgacaggttccttggatgattttggatttgaagattaccttaacttgccccaagactctgacagcctccgcataccggacatgcaccacgggatggaggtccgccttggcctgtcgaaggggcctgtctgccccagtttcaattgattcccacccatgtattagtcttgtgatgcgttgtgctccccgtccagcatctataccagtcactagactgtatcatggatttgcgaaacgtgacaactaaatttggtattgcgtcagtttgaattccttaacttcgatcgtactgtcgctgtgttttcagttttggacctctatttatttgcttgtcgttctctgtttaatgggcattcctgttctgtagtctatt

SEQ ID NO: 3917 - DNA, 660 bp, Triticum aestivum
caagacaacagagagagaaagagggaaaaaaagagaggctcagcagcggcgatggcgagcggcggcggcccgatgacgaagaaggagctgggcgagacccacgacgtcctccgcttcggcgtcaacgacagcgtccgcggcgacctcgcgccggcgcaccccgtccaggccaccatccacaaggagaacaagttctgggaggagaagaagaagttcgggaccgaggccatctacggatccgccttcaacatccgcagggatctcgacgcccagatcctctccaggttccaaaggcccccaggtgcattgccatcatctatgctaggatatgaggcgattacaggttccttggatgattttggatttgaagattaccttaacttgccccaagactctgacagcctccgcataccggacatgcaccacggaatggaggttcgccttggcctgtcgaaggggcccatctgccccagtttcaattgattccacccatgtattagtcttgtgatacgtcgtgctccccgtccagcatctataaccagtcactagactgtatcatggatttgtgaaacgtgagaactaaattggcattgcatcagtttgaaattccttaacttcagattgtactgactctgtgttttcagttaatggacctctatt

SEQ ID NO: 3918 - DNA, 552 bp, Triticum aestivum
gccgcggcccgatgacgaagaaggagctgggcgagacccacgacgtcctccgcttcggcgtcaacgacagcgtccgcggcgacctcgcgccggcgcaccccgtccaggccaccatccacaaggaggccaagttctgggacgagaagaagaagttcgggaccgaggccatctacggatccgccttcaacatccgcagggatctcgacgcccagatcctctccaggttccaaaggcccccaggtgcattgccatcatctatgctaggatatgaggcgatgacaggttccttggatgattttggatttgaagattaccttaacttgccccaagactctgacagcctccgcataccggacatgcaccacgggatggaggtttgccttggcctgtcgaaggggcccatctgccccagtttcaattgattccacccatgtattagtcttgtgatacgttgtgctccccgtccagtatctataaccagtcactagactgtatcatggatttgtgaaacgtgagaactaaatgggcattgcatcagtttgaaattccttt

SEQ ID NO: 3919 - DNA, 586 bp, Triticum aestivum
cagcgtccggagagagagagagagcctgagcagcgacgatgtcgagcttgatgacgaagaaggagatcgggcagacccacgacgtgctccgcttcggcgtcaacgacagcgtcagggccgacctcgcgccggcgcaccccgtccaggccaccatccataaggagaccaagttctgggacgagaagaagaggttcgggaccgaggccatctacgggtccgccttcaacatccgcaaggacctggacgcccaaatcctctccaggttccaaaggcccccaggtgcattgccatcatctatgctaggatatgaggcaatgacaggttccttggatgattttggatttgaagattaccttaacttgccccaggactctgacagcctgcgcataccggacatgcaccacgggatggaggttcggcttggcctgtcgaagggccctgtctgccccagcttcagttgattccttccacccatgtattttgcttcccgtccagcatctacactgtatcatggattggtgaaacatgagaagtaaataattgggtattgcatcagtctgaatttcatgaaatctccacggcgtcc

SEQ ID NO: 3920 - DNA, 951 bp, Triticum aestivum
agagagcctgagcagcgacgatggcgagctcgatgacgaagaaggagatcgggcagacccacgacgtgctccgcttcggcgtcaacgacagcgtcaggggcgacctcgcgccgccgcaccccgtccaggccaccatccataaggagaccaagttctgggacgacaagaagaggttcgggaccgaggccatctacgggtccgccttcaacatccgcaaggatctggacgcacaaatcctctccaggttccaaaggcccccaggtgcattgccatcatcgatgctaggatatgaggcaatgacaggttccttggatgattttggatttgaagattaccttaacttgccccaggactctgacagcctgcgcataccggacatgcaccacgggatggaggttcggcttggcctgtcgaaggggcctgtctgccccagcttcagttgattccttccacccatgtatttgtcttgtgcttcccgtccagcatctatggcagtttcatggattggtgaaacgtgagaagtaaataaatgggtattgcatcagtttgaatttcttgaaatgtccccggcgtcctggtcgctagttgagcgttacttactattcttgctagtttggtgttttagcagcaaagttcgttagcgccccactaatatcagtggtgacccctctaggcattaaggggggatggtgtgtcgacgagggaagcttggtggttgctgctgttcttcggaggtgtccgcccatcgagacgcggcgagattttcgatttggggtacgctctttcgcgttgtagttgagttgtgttgttgggacacggcgacccatgtgtcagtggcccaatgttaggtggccgtacgtcaggggatccggctccttgctgttgatggctgtctttggactagctggatgtggaggtgatgctatgctctttgttcgcagtgagtgatag

SEQ ID NO: 3921 - DNA, 546 bp, Triticum aestivum
gaagagagcctgagcctgagcagcgacgatggcgagcttgatgacgaagaaggagaccgggcagacccacgacgtgctccggttcggcgttcaacgacagcgtcaggggcgacctcgcgccgccgcaccccatccaggccaccatccataaggagaccaagttctgggaggagaagaagaggttcgggaccgaggccatctacgggtccgccttcaacatccgcaacgatctggacgcacaaatcctctccaggttccaaaggcccccaggtgcattgccatcatctatgctaggatatgaggcaatgacaggttccttggatgattttggatttgaagattaccttaacttgccccaggactctgacagcctgcgcataccggacatgcaccacgggatggaggttcggcttggcctgtccaaggggcctgtctgccccagcttcagttgattccttccacccatgcatttgtcttgtgcttcccgtccagcatctacgccagtcactactactagactctatcatggattggtgaaacatgaga

SEQ ID NO: 3922 - DNA, 841 bp, Triticum aestivum
gtggaaggctgctgttagccatggcctctgctgaaggaggagacaaataccggtccttcctgcacggcgacggcgagaagaacacggtgtggaggcatggagcccctcccaactacgacctcgtgaacaagctcttcgaggaagagcggaccaaggaatgggccgaggggtctgtggaagagagggtgcagcgcttgctcaagacctgggagatggagttggtccacaaggtgcggcccgaggaccagaagagcgtcaaccccaagaactactccgccaccaccaacgggctgaagcctctgacgcgggaggaggtgatggccatgggcggctacaacgcgttcctggcgaccacgctgccgccggagcaccgcatctacgacccggacgcggagtcggtggagtcggccacgtccaccttcctcacggcgttcccccggggcttcgccatcgaggtgctggacgtgtacagcggcccgcccaggatcgccttcaagttccggcactggggctacatggagggcccgttcaagggccaccctccgcacggccgccgcgtcgagttcttcggcgtctgtgtcttcgacgttgatgaggacaccaaggtggagaaggcggagttcttctacgagcgtggcaactttcttgcgagcttcttgagtgcgcctgcttctgcttctgcttctgcttctgctgcgtcggcttcaggctgccctgtgatgagaggagactgatgcgcgacggaatcgacgaaacatgcatgtcactagctagtattgtctccagagttcggatttggctatattccatgtaatgccaagaaatgtttaaataaaaaaag

SEQ ID NO: 3923 - DNA, 612 bp, Triticum aestivum
gaagtgtcgtcagctgtggagtgaatcatttgtgcaaattttctacttctttcctcaaactcctccctccatttgtccaaagccacgtgatcggccagagaacttgtcaagaaccacctttgcggacgcgtgggcggctccgccgcctccatctccgagggccaaaacctcaaggtctccgtcgacatgtccgtcgccttcccggatctctcccaggcccgcccgggggaccggctgagcataacggcaagggcactcggacacaagggcgcctactccggcacacacgtgctcttcaccaacgccggcaccggcaacgtcgtcgccgagggcaggcactccctcttcggtaacatgaagaagtcgccaccacccaagccagcggccactactcacaggagcaacttgtgatgatgcctctgcctgctcctactccgctactctgttctgtattctgatgaagagtaccttgccatcagacatcaagtataaaggagatatgttctgaacgggcgcctactcctctcttatcagttcggcctgtatatgtaacattgattcagagcagtacgacgtatgatgtgtattatgccactcgactttggtactcac

SEQ ID NO: 3924 - DNA, 706 bp, Triticum aestivum
cgtccgtcagcgccgacgagcacgcgcgggtgacgcgctctcctccgccgcatccgcatccctatcacagtccactactcatctgtcgccgagcttcttcgagggattcgcgctgcgcgggatccgcgtcctccgcctccacccgggcttcatccactgctcctacaccgtccccccgagcctcaccgactccaccaccggctgcctcgccgccggcgccgtcgtggccctggtcgacgagatcggctccgccgcctccatctccgagggccaaaacctcaaggtctccgtcgacatgtccgtcgccttcccggatctctcccaggcccgccctggggaccggctgagcataacggcaagggcactcggacacaagggcgcctactccggcacacacgtgctcttcaccaacgccggcaccggcaacgtcgtcgccgagggcaggcactccctcttcggtaacatgaagaagtcgccaccacccaagccagcggccactactcacaggagcaacttgtgatgatgcctctgcctgctcctactccgctactctgttctgtattctgatgaagagtaccttgccatcagacatcaagtataaaggagatatgttctgaacgggcgcctactcctctcttatcagttcggcctgtatatgtaacattgattcagagcagtacgatgtatgatgtgtaatatgcaactc

SEQ ID NO: 3925 - DNA, 891 bp, Triticum aestivum
cagcaggtggccatggccgactcccccgagttagctcgtgctcgggacgtcctgagcgtgagcgccgacgagcacgcgcgggtggacgcgctctcctccgccgcatcggcatccctatcaacggccgctactcatctgtcgccgagcttcttcgagggattcgcgctgcgcgggatccgcgtcctccgcctccacccgggcttcatccactgctcctacaccgtccccccgagcctcaccgactccaccaccggctgcctcgccgccggtgccgtcgtggccctggtcgacgagatcggctccgccgcctccatctccgaaggccaaaacctcaaggtctccgtcgacatgtccgtcgccttccctgatctctcccaggcccgcccgggggaccggctgagcataacggcaagggcgctcgggcacaagggcgcctactccggcacacacgtgctcttcaccaacgcctgcaccggcaacgtcgtcgccgagggcaggcactccctcttcggtaacatgaagaagtcaccaccacccaagccagcagctaccactcacaggagcaacttgtgatgatgcctctgcctgctcctgctccactattctgttctgtattctgatgaaggtaccttgtcatcagacatcaagtataaaggagatatgttctgaacgggcgcctactcccctcttatcagttcggcttgtatatgtaaacttgattcagagcagtacgatgtatgatgtgtgttacgtgaaactagaactcgggaccttgaagtgcatccaaaagcacgattcatatatcaaacattggtcgtcgtctaacatttattcgtttacatcttataagaaagaaagctgcaattggtattcgtgttgataagattggaa

SEQ ID NO: 3926 - DNA, 1177 bp, Triticum aestivum
atgcgccctcatcacagcacaggccatcacatcttgcctggagttggtgatttggatttgaggaagagattgacaggctcaagcgcgacaagaacctcttgatcacagaggtagtgaagctaaggcaggatcagcaagctactaaggataatgtgcaagccatggaaggcaggctacgagctgctgaacagagacaggcccagatgatggggttcttggcaagagcaatgcgtaacccacacttcttccagcaattagtccagaagcaagataagaggaaggagcttgaagatgccatctcgaagaaaagaaggcggcctatagacaatgctccattttatggttcgggggcaacaacaagtcagagcgagcaacttgattcacagttcctgtttgattctggtgtcctcagtgaacctggaatgaacgggatggagaatttagcgcagaacattcaggagcttgggcagggcaaaacagacgaggagaagaaggatgaagctaatgggcagctggacatcaacagcgatttctgggcagagctattttctgatgattttggagacgaagacgggtctgggctgtcagagttggagggaaggagacctgaagatatcgatgaactgggtcagcagttggggtatctgagttctactagcccgcagtagagttttgttcacagtggttcacttcaaccaacaaacattgcttcttcagtactactattgcagatcatcttgaacaatctgatttagttgattggtggcaacatgactggctatctgaggtgttccataccggggattggaacacctctgggtagggagtagaagctgaagactaattgctgcgtcgcttgatggagacccatgacgtgtattgaatggttacctaaactcgtaactctgaagaagatggtccaggtagtcgacattcggttgttctgagctggtgttcagcagcagtagctgtggaagtgtgttactgtatatactcgttgggtgaagctttgttgtgaaagtctggtctgtagtcagccgttggcatctgggtgtgggttcagtcatttctccttctgccgtccatttgccatttaccttacttttagggcctgtgtcctgtgtgatgattggtagtgtatgctgcacctctgttatattgagataataaatgttga

SEQ ID NO: 3927 - DNA, 766 bp, Triticum aestivum
ggaaatttcccactgcagtcctcatttcaaaggattccgagatgtgtgtacacttcaactaggctgtatgagtataggggttgggattcaaaaattgcaaaccccaagcatcgccggtttacctggggattacagacagcagagcgctttgcggtagatttctacatttccgattttcaatctgggcttcgagcattggtgagaacaggaagtggtgcacgggtgacaccatatgtcgatgaaccggtagtaattgacatcaatcctgagaacaaggacatgtctcctgaatttctaagatggctacgagaaaggaacctctcaagtgatggtcggaaaatgcgcctaaaagaaggatacatcaaggaaggaagcactgtgagtgtgatgggggttgttcaaaagagcgggagcatgttgatgatagtacctccatcggagcctgtctcatctggttgcctgtgggggaagtgcctattcccatcgaaccttgacggactagtcttgagatgtgaagatacttcagacatggatgtcataccagtatagcaagctgagtgtctagatacatccgtatctagcaaatctcagacacgtaatgtggattggagggagtactaaagattgagtatggctgggtaatctgtgttttcactgtatacccctttctcaatgtattacgtcctcttttgctcatttttggttatgagctcttaatacgtgtgtaatatggtggcatttgggttgtttgaagacttgttccctt

SEQ ID NO: 3928 - DNA, 799 bp, Triticum aestivum
tcattcaaggatccgagaggtgtgtacacttcaactagctgtatgatatagggctgggattcaaaactcaaccccaagcatcgccgtttactggggattacggacagcagagcgacatccgttgatttctacatttcagatttccagtctgggcttcgagcattggtgagaacaggaagtggggcacgggtgacaccatatgttgatgaatcggtagtaattgacgtcaatcctgagaacaaggacatgtctcctgaatttcttagatggctacgagaaaggaacctctcaagtgatggtcggaaaatgcgcctaaaagaaggatacatcaaggaaggcagcactgtgagcgtgatgggggtcgttcaaaagaatgagagcgtgttgatgatagtacctccatcagagcccatctcatctggttgccagtgggggagttgtttcttcccagcgaaccttgaaggactggtcgtgagatgcgaagatacttcagacatggatgtcataccagtatagcaagctgatgattgccgtggtgtggaatagctgctgttgaagagggaatgttggcctgtcgaatcttttgacctcgggttgggtttgattggtagagtattagaactgagaaaaaatgtacaaatgttaggtgtgattaaggctagtaaagatgggagtatggctgctggttaatctgtgtttggctgtatagtcctttttcaatgtgttttgtcctcctttgctcctgttttttcggttatgagctctcaatacttgtgtaatatgattgcttttgggctgt

SEQ ID NO: 3929 - DNA, 967 bp, Triticum aestivum
  N_region (206)..(206): n = any nucleotide
  N_region (213)..(213): n = any nucleotide
attgcatgctcagcttcatccggactgttgtattatatatgtacacagattgcacagactggtattgttaagtagcaaaagtaagttcattgcaaggatgatagtcaatcaagagaacatggaaggctggaccaattccatatcaggggaacattaaagcaagaaagcttgggaagaaggagaggacagtagaggggattacgcanagcagancgacatgcggtcgatttctacatttcagattttcagtctgggcttcgagcattggtgagaacaggaagcggtgcacgggtgacaccatatgtcgatgaatcggtagtaattgacgtcaatcctgagaacaaggacatgtctcctgaatttctaagatggctacgagaaaggaatctctcaagtgatggtcggaaaatgcgcctaaaagaaggatacatcaaggaaggcagcactgtgagtgtgatgggggtcgttcaaaagaatgagagcgtcttgatgatagtacctccatcagagcccatctcatctggttgccagtgggggagttgtttcttcccagcaaaccttgaaggactagtcgtgagatgtgaagatacttcagacatggatgtcataccagtatagcaagctgatgattgccgtggtgtggaatagctgctgttgaagagggaacgttggcctgtcgaatcgggttgggtttgattggtagagtattagaactgagaaaaaaatgtacaaatgttaggtgtgattaaggctagtaaagatgggagtatggctgctggttaatctgtgtttggctgtatagtcctttttcatgtgttttgtcctccttcgctcctgttttttcggttatgagctctcaatacttgtgtaatatgattgcttttgggctgtttgaagacatgttgaatcgggtttatgtgttatttaggatgaacttcttgcactgctgttaaagcctaaatatatt

SEQ ID NO: 3930 - DNA, 742 bp, Triticum aestivum
ctgtcatctcctcttggagcttctgctgattttgacgaggatgaactggaagcggagctggaagagttggagggagcagaattggaatcccaactactggagcctgttgtaactattcctattcatacgacgaccgtgccaggcaaggcgcaaccaactcgccctgctccgcagaaagcgtcggctgaggaggatgagcttgctgcactgcaagctgaaatggcattgtgatcaggtagccttctcctgcgttctagacatggttacttaaactatgccttctcatttgtctttccacaccatcttccatcatttgatcaaacacctctaggacttgcagtttctgggaggaacaacatacaagaaggcccccagtgaatgaagaggtgaaatgtacaaatgattggctggacggtatgtggtcgcaggcgagtctggctacacatatatttggccgtgtgtgtataatcttgggtgggagacatttgacgaacgaggcaggaaaggctgctccagtccagtgtttatttctatctagttgtttgattgaaggtctgtttcccggatataatttttggcacggtcagctccattccaggtcgtgtgcaatgctcattgttgtggcacactatttactgttgacccgtattatctcttgccatgtaaaccaagttatctcattccagtgttcgctaatttggtgtgttgacgggacagttctttcctttcaattctatatata

SEQ ID NO: 3931 - DNA, 733 bp, Triticum aestivum
agctatgaaagcgatgcaaaaagcgaacaaatatcgatgatgtcgacaagactatggacgaaattaatgaacagacagaaaacatgagacaaatacaagatgctctgtcagctcctcttggagcttctgctgattttgacgaggatgaactggaagcggagctggaagagttggagggagcagagttggaatcccaactactggagcctgttgtaactattcctattcatacgacgcccgtcccaggcaaggcgcaaccaactcgccctgctccacagaaagcatcggctgaggaggatgagcttgctgcactgcaagctgaaatggcattgtgatcaggcccccagtgaatgaagaggtgaaatgtacaaatgattggctggacggtacgctgtcgcaggcgagtcctggctacacatatatttgcccgtgtgtataatctttggtgggagacatttggcgaacagaggcaggaaaggctgctccagtccagtgtttatctagttgtttgattgaaggtctgtttcccggacataatttttggcacggtcagctccattccaggtcgtgtgcaatgctcattgttgtggcacactatttactgttgacccgtattatctcttgccatgtaaaccaagttatctcattccagtgtttgctaatttggtgtgttgacgggacagttctttcctttcaattctatatatacaactcactagtactattgagtttg

SEQ ID NO: 3932 - DNA, 1316 bp, Triticum aestivum
gcggagggaagaaaatggcaccgccgcggcgcgtgtgcgtgaccggcggcggcgggttcatcgcctcgtggctcgtcaagctgctcctctcccgcggctacgccgtccacgccaccctccgggacccatgtgaccccaagaatgtccacctcaagcagatggacgaggcccgggagaatctgcacctgctcaaggccgacgtgctcgactacgacgcgctaacacgtgcgtttgagggatgtgagggggtcttccacctcgccactccggtgcctgaagataagattgctgatcctgagtcagaagtattggctcctgctgtgaaaggtacttcaaatgtgctgaaggcctgctcagctatgaaggttcagaaggttattgtcttgtcatccaatgctgctgttgattttaacccgaattggcctcaagacagactcaaagatgagagtagctggtcagacaaagatttctgccaggagaatgaggactggtattctgttgccaagattgtggccgaacaggcatccttggaatattcagagaaacatggattaaatgttgttacgctttgccctcctttggttttgggcccattgttgcagcctactgtgaataccagtagcaaattcttaatctatgttattaatggaggacctgacgtgatgagcaacaagctgtggcacattgtagacgtccgtgatgtcgcggatgccttgctgcttgtgtacgagaaggccgaatcgtctgggagatacatttgcgcgccgaatagcgtctgcacaaaggacttggtggacttgctgaggaagatgtacccacagtacagctatgtgaacaacatcgacgcggaccgtaaagcgccgctgtcatcgcagaagctgaaggatctgggctggaagccgaggaagctggaggagacgctctcggacagcgtgggctgctacgagaaggccggccttctgcagggttccgttgcgcgtcattgccggcttccgcatctgttccgtctggctggtgatcagttaatgtaccttggtgactggtgctttgttttcatatggtcggacttctgtaagctgtagtgtcgctggacggagcctcgcaacagcaacaatggtcgaacctcttcctttgcatccacaaataagcagctatccctgctgtatctgccgccccctgtctgtcacctccggaaatggacaaagtgtaaaacaagcagagcagagacgaaatgcatgtacttcctccgttcctaaataagtactatctctttctagagatttgtataagtgactacatacagacaaaatgagtga

SEQ ID NO: 3933 - DNA, 954 bp, Triticum aestivum
ccatcggttccggccaacgaccggcaggggaccctaggcgagttgacattggagcagttccttgtcaaggccggcgtggtccggggatctggcgccggcggccaggcgcctgtgccggtcggcatggtccatggacagatgaaccccgcacaacaggggcagcagcctggcccaatgatgtacccaattgcaccagccaatggcatgttcccggcgatgggcgacggcatggggttcatccccaatgggtatgcagggatggttgtggtgccgccgccaccacctcctcaaggtggggtggtgggtatcatgagccccgggtcgtcggacgggaggagcgccatgacgcaggctgacatgatgaactgcatgggcgatggaacgatgatggagagtggcggcacctggaaacgcggtgccccagaggatcagtcttgcgagagaagcatcgagcgccgccaccgccgcatgatcaagaaccgtgagtcagccgcacgatcgcgtgctaggaagcaggcttataccgtggagcttgaagctgaactgaaccacctcaaggaggagaacgctcgtctgaaagctgaggagaagacaattctgctgaccaagaaacaaatgttggttgagaagatgatagaacagtccaaggagaacgtgaacgccaagaagggtggcaccctctcgcggcgctgtggcagctgcatctggtgaaaggtgacctgccatccatccatagccgtgctcgcaggaggatgaggaggaattgtggtgtttatagcagtaacattttctttcccgagcggggtcgtatagtaatttactagtagtacctaaaaccataaggacccgaatgtcagtgtttatctggtcaagcaagtgaacttctgttgttgttactgtttataggtatatggatttgtcagaaagaaaattagcaatatgttgatgtgtact

SEQ ID NO: 3934 - DNA, 508 bp, Triticum aestivum
ccggaaacgcggtgccccagaggatcagtctttcgagagaagcatcgagcgccgccaccgccgcatgattaagaaccgtgagtcagccgcacgatcgcgtgctaggaagcaggcttataccgtggagcttgaagctgaactgaaccacctcaaggaggagaacgctcgtctgaaagctgaggagaagacaattctgctgaccaagaaacaaatgttggtggagaatatgatagaacagtccaaggagaatgtgaacgccaagaagggtggcaccctctcgcggcactgtggcagctgcatctggtgaaaggtgacccgccatccagcttccatagccgtgctcgcaggagcatgaggaggaattgtggtgtttatagcagtaaaattttcattccggagcggggtcgtatactaatttactagtagtacctaaaactataaggacccggatgtcaatgttatctggtcaagcaagtgaacttctgttgttgttactagtttatagggg

SEQ ID NO: 3935 - DNA, 686 bp, Triticum aestivum
acctcctcaaggtggggtgggtatcgtgagcctagggtcgtcggacgggaggagcaccatgacggaggttgacatgatgaactatatgggcgacagaacaatgatggagaacagcggcgcgcggaagcgcggcgctccggaggatcagtcctgcgaggggagcatcgagcgccgccaccaccgcatgatcaagaaccgtgagtcagccgcacaatcgcgtggcaggaagcaggcttataccaaggagcttgaagccgaactaaaccacctcaaggaggagaactctcgtctgaaagctaaggagaagacaattttgctgaccaagaaacaaattctagttgagaagatgatggagcagtccaaggaaaatgtgaacgccaagaagggtggcgccctgtcgcggcgctgcagtagctgcatctggggataggtgacccaccattcagcttccatagtcgtgctggcaggaggatgagaatgaataatggttacctttcctttctagagcggggtggtatcataatttactagttgtacctaaaacccataaggacccaaatgccagtgtttttctggtcaagcaagtgaacttatgttgttgttactgtttataggtatataggtttgtcagaaacttcaggaaaatggaacaaaagaaagttagcaatatgttatgtgtactagca

SEQ ID NO: 3936 - DNA, 1126 bp, Triticum aestivum
cacaaatctctatacaatgatacaatccccagagattttcacagatcataagcacgagagagtccacaagaccatcatcaccgagctaacaagaacttcaagatgaacatcaccaccaaggacaccgcaaccatcgaggcaatcgggaacggcttcttcatgaagggcgatgagggtgtgagaacacggcgggggccgagaaccaccaggccgtggcactgcgggtgcagagcgaccaggccgtcttctaccagtgctacttcgacgggtaccaagacacgctactacacccacgcgcaacggcagttcttcacgcgactgcaccgtacaccgggcaccatcgacttcatcttcggtcaactcccaggtggtcatccagaactgcctcatcctgccgcgcaagccccatggacaaccagctcaacatcatcaccgcgcaagggcggcgcgagaagcgctccgtcgggggcaccgtcatgcacaacaacaccatcgagccgcacccggacttcaaggactcgacgggcaagatcaagacctacctggcgcggccatggaaggagtactctaggaccatctacatccagaacgagatcggcgccttcatcgaccccaagggctggctcgagtggaacggcgacttcgccctcgagaccctcttctacgccgaggtggagaacaccgggcccggcgccgatatgagccagcgcgccaagtggggcggcatcaagactgtcacctacgctgacgcacaaaaggagtacaccgtcgaggccttcatccagggcgagcagttcatccccaagtacggcgtgccctacatcccggggctcctcccgcagtcggaggcggggagggatcattaactcatcactccatccgttaccacgtttcatttcccccctgctccgttgctacttatatgcaattagctgagttgacatatactgttaattatacactatggtgcactgcgtaccatgatgattaaccaatacatgtatacttactaactagctttaatttggaggagagaaagatgtgcatgtgtatgtaaacctgggatgtttatttttcgtatgtataccttgctaatttctttactcggtgtgtcttcacgatgagg

SEQ ID NO: 3937 - DNA, 806 bp, Triticum aestivum
ctaccagtgctactcgacgggtaccaatacacgctctacacccacgcgcaacggcagtttttccgcgactgcaccatcaccggcaccatcgacttcatcttcggcaactcccaggtggtcatccagaactgcctcatcctgccgcgcaagcccatggacaatcagctcaacatcatcagccgcgcaagggcgccgcgagaagcgctccgtcgggggcaccgtcatgcacaacaacaccatcgagccgcaccccgacttcaaggactcgacgggcaagatcaagacctacctggcgcgcccatggaaggagtactccaggaccatctacatccagaacgagatcggcgccttcatcgaccccaagggctggctcgagtggaacggcgacttcgccctcgagaccctcttctacgccgaggtggagaacaccgggcccggcgccgacatgagccagcgcgccaagtggggcggcatcaagactgtcacctacgccgacgcgcagaaggagtacaccgtcgaagccttcatccagggcgagcagttcatccccaagtacggcgtgcccttcatcccggggctcctcccgcagtcggaggcggggagggatcattaactcatcactccatccctcaccatgtttcattattccgctgctccattgctgcttgtatgcaattagatgagttgacatatactgttatacactatggtgcagtgcgtaccatgattgattaaccaatacatgtatacttactaactagctttaattttgggactgtctatttgacatttgactgtttttcaat

SEQ ID NO: 3938 - DNA, 691 bp, Triticum aestivum
ggacacgctctacacccacgcgcaacggcagttcttccgcgactgcaccatcaccggcaccatcgacttcatcttcggcaactcccaggtggtcatccagaactgcctcatcctgccgcgcaagcccatggacaaccagctcaacatcatcaccgcgcaagggcgccgcgagaagcgctccgtcgggggcaccgtcatgcacaacaacaccatcgagccgcaccccgacttcaaggactcgacgggcaagatcaagacctacctggcacgcccatggaaggagtactccaggaccatctacatccagaacgagatcggcgccttcatcgaccccaagggctggctcgagtggaacggcgacttcgccctcgagaccctcttctacgccgaggtggagaacaccgggcctggcgccgacatgagccagcgcgccaaatggggcggcatcaagactgtcacctacgccgacgcgcagaaggagtacaccgtcgaggccttcatccagggcgagcagttcatccccaagtatggcgtgcccttcatcccggggctcctcccgcagtcggaggcagggagggatcattaactccatccctcaccatgtttcattattccgctgctccattgctgcttgtatgcaattagctgagttgacatatacgtactattatacactatagtgcattgcgta

SEQ ID NO: 3939 - DNA, 700 bp, Triticum aestivum
gaccaggagctcatcgactgcagcgtcgacggcaacacggctgcaaacgcggcatgatggactacgctttctcctacatcgcctccagcgcgggctccacaccgaggaggcctacccgtacctcatggaggaaggcagctgcggcgacggcaagaagagtgagtccgaggcggtgtcgatcagcggctatgaggacgtgccggcaaaggacgagcaggcgctcatcaaggcactcgcccaccagcccgtctccgtcgccatcgaggcctccggcaggcacttccagttctacagcgggggggttttcgatggtccgtgcggcgcgcatttggatcacggcgtggcggcggtcgggtacgggtcggacaagggcaaggggcacgactacatcatcgtgaagaactcgtggggcgccaagtggggcgagaaggggtacatcaggatgaagaggggcaccggcaagggcgagggcctctgcggcatcaacaagatggcctcctaccctaccaaggacaactgatccatgatgacctgctggcggctgctgatgttcctggctgagatgctgcatccaggggatgcactgaaccatcatcattgagagtcgtcgttcgtcatctttgcatttcccttgttttttttctcttgtgttgtttgtttcggttaacgcgacgacggtggatcgaataagaaaaaaaat

SEQ ID NO: 3940 - DNA, 748 bp, Triticum aestivum
ttattcgacacaaattattcatacagatcaacgggagacatcagtcatggatgatgtcctgcaagtcaaatgcggcgaccgagcagggacaaaacaccaccgatcgccaagatttccaccgtcgcatcccgtcgagtacgtgcttctggtcgtggcgcggcgaagtatcaacatcatgaaggacttcgacgagccggggaccctcgccccgaccgggctgctactcggagacgccaagtacatggtcatccagggtgaacctggcgccgtcatccgcggcaagaagggcgcgggaggcatcaccctgaagaagaccgggcaggcgctggtggtcggcatctacgacgagcccatgaccccggggcagtgcaacctggtggtggagaggctgggcgactacctggtagagcagggcatgtagacgacgacggccatcacgccacgccgcagcaacaacaattactaccggccaaaagacacagtagatctccacgcgcacgcatatgggattgtggttcaatttctctcgcatcctcctctaatcctctctccctgtcccggcaactacttcgccgattaccacccctcttgattgatccgcgatatttttttccccttgtttcatgatgatgaagccgttcgtttcggctaataattttgattttttctcctatacgtatcgtttttggtcatttgggttgccgtttgagttgtggatccggaacaatatatatatgtgattgccatt

SEQ ID NO: 3941 - DNA, 707 bp, Triticum aestivum
gaagagtcgtggcagacttacgtggacgagcacctgatgtgcgacatcgagggccaccacctcgcctccgccgccatcctcggccacgacggcaccgtctgggccccagagcgccgatttcccgtcgttcaagccggcggagatggccaacatcatgaaggacttcgacgagccggggaccctcgccccgaccgggctgctactcgcagacgccaagtacatggtcatccaaggtgaacctggcgccgtcatccgcggcaagaagggcgcgggaggcatcaccctgaagaagaccgggcaggcgctggtggtcggcatctacgacgagcccatgaccccggggcagtgcaacctggtggtggagaggctgggcgactacctggtagagcagggcatgtagactactgacgacgaccacgccacgccgccgcagcaccaacaatactaccggccaaaagacacagtagatctccacgcgcacgcatatgggattgtggttcaatttctctcgcatcctcctctaatcctctctccctgtcccggcaactacttaccacccctcttgattcatccgcgatattttttccccttgtttcatgatgatgagccgttcgtttcggctaataattttgatttttctctcctatacgtatcgttttggtcatttgggttgcccgtttgagttgtggatccggacaatatatata

SEQ ID NO: 3942 - DNA, 717 bp, Triticum aestivum
caggcaacctgaccgcgctgtcggagcaggactgatcgactgcagtgtcgatggcaacagcgctgcaatggcggctagatggactacgccttctcctacatcgcatccagtggcgggctgcacaccgaggaggcgtacccctacctcatggaagaaggcagctgcggcgacggtaagaaggcagagtccgaggcagtgacgatcagcggcttcgaggacgtgcccgccaatgacgggcaggcgctgatcaaggctctcgctcaccagcccgtctccgtcgccatcgaggcctccggcaggcacttccagttctacagcgggggggttttcgatggtccttgcggcgcgcagctagatcacggcgtggcggcggtcgggtacgggtcggacaaggggaagggccacgactacatcatcgtgaggaactcgtggggtgcggactggggcgagaagggttacatcaggatgaagaggggcaccagcaacggcgagggcctctgcggcatcaacaagatggcctcctacccaaccaaggacaagtgatgttccagcctcagatgctgcatccacaggattgaagatttgaaccatccttgagagtccttgttcccgatctttgcatttccatgctttttctttcatggtttttcttttctttttcaatggttcctttcggttaaaacgacgaacatggactgaaataataaaatttgtttc

SEQ ID NO: 3943 - DNA, 636 bp, Triticum aestivum
gatggactacgccttctcctacatcgcgtccagtggcgggctacacaccgaggaggcgtacccctacctcatggaggaaggcagctgcggcgacggtaagaaggccgagttccaaggcggtgacgatcagctggcttcgaggacgtgccggccaatgacgagcaggcgctgatcaaggctctcgcccaccagcccgtctccgtcgccatcgaggcctccggcaggcacttccagttctacagcgggggagttttcgacggtccttgcggcgcgcagctagatcacggcgtggcggcggtcgggtacgggtcggacaaggggaagggccacgactacatcatcgtgaggaactcgtggggtgcggactggggcgagaagggttacatcaggatgaagaggggcaccagcaacggcgagggcctctgcggcatcaacaagatggcctcctacccaaccaaggacaagtgatgttccagcctcaaatcctgcatccagaggattgaagatttgaaccatccttgagagtccttgttcccgatctttgcatttccctgctttttctttcacgtttttccttttctcaatggttcctttcggttaatgcgacgaacatggactgaaataataaaatttatt

SEQ ID NO: 3944 - DNA, 592 bp, Triticum aestivum
  N_region (5)..(5): n = any nucleotide
aggangccgacaaggtgttcatccacaccatcaccagcccagttccagaccatcttcggcatcacgctcatcgagatcctgtcgaagcactcctccgacgaggtgtacctcgggcagcgcgacacgccggagtggacgtcggacgccaaggccctggaggcgttcaagaggttcggcacccggctgatggagatcgagaagcgcatcctggacatgaacaaggacccggcgctcaagaaccggaacgggccggtgaagatgccctacatgctgctgtaccccaacacgtcggacgccggcggcgagaaagggctgggcctcaccgccatgggcatccccaacagcgtctccatctgagctgagcgaggtcctttaatctgaacagcgtctcgttcagtagattggttggttcgtgtctcgcgtgcagggtgtattgtgttcctttaatccttctcatcattcgcttctgggtggttgcggtaattagttgcgagggattagtggatgatggcaaatgatgatcgtagatgatgttgatagggagagaacaatgaggcatgaataagcagtcgtgtgtgcattcctcttatct

SEQ ID NO: 3945 - DNA, 642 bp, Triticum aestivum
acctcccgaaccgccgactgtgaccgtcggaagatgccggaggaggcgaagaggagtacaacagctgcagaagggcgggaaggagccgacaaggtgttcatccacaccatcaccagccagttccagaccatcctgggcatcacgctcatcgagatcctgtccaagcactcctccgacgaggtgtacctggggcagcgtgacacgccggagtggacgtcggacgccaaggccctggaggcgttcaagaggttcggcacccggctgatggagatcgagaagcggatcctggacatgaacaaggacccggcgctcaagaaccggaacgggccggtgaagatgccgtacatgctgctgtaccccaacacgtcggatgtcgacggcgagaaagggctggggctcaccgccatgggcatccccaacagcgtctccatctgagtgtactctttctttctcagtagacggacgtccgccggccgttggttgattcctgtctcgcagggtgtattgtgttacttttcattggcttccggctggctgcggtaattagtttgtcaggggtgttgatagggagaggacaatgaggcatgaataagcactgcgtgcattctttctagtactagttatctccagaaatgtcagtgt

SEQ ID NO: 3946 - DNA, 804 bp, Triticum aestivum
ggaaggaggtgcgcgaggttgggcacggtgacctcaaggatgccgactggtggcccaagatggtgaccgtgcaggagctggccaagacgtgcaccaccatcatctgggtggcgtcggcgctccacgcggcggtcaacttcgggcagtacccgtacgctgggtacctcccgaaccggccgacggtgagccgtcggaagatgccggaggagggcgaagaggagtacaagcagctgcagaagggcgggaaggaggctgacaaggtgttcatccacaccatcaccagccagttccagaccatcctgggcatcacgctcatcgagatcctgtcgaagcactcctccgacgaggtgtacctcgggcagcgcgacacgccggagtggacgtcggacgccaaggccctggaggcgttcaagaggttcggcacccggctgatggagatcgagaagcggatcctggacatgaacaaggacccggcgctcaagaaccggaacgggccggtgaagatgccctacatgctgctgtaccccaacacgtcggacgccggcggcgagaaagggctcgggctcaccgccatgggcatccccaacagcgtctccatctgatcgtgcgtgatctttcttcagtactcctagattggttggttcgtgtctcgcagggtgtattgtgttcctttaatccttttcattcgcttttgggtgattgcggtaattagttgttgtcagggattagtggatgatgggaaatgatgatcgtagatgatgttcatagtgagaggacatgaggcatgaataagcagtcgtgtgt

SEQ ID NO: 3947 - DNA, 682 bp, Triticum aestivum
ggtcagcaccggggacgctttcaacgtcgtcggtcagcccctgcgcttcccagagtcccctctagtgagcttctcggcaagggacatgataaggggactactggtcaaggacccgcagcaccggctgggccacaagcgcggagccacggagataaagcagcaccccttctttgagggcgtgaactgggccctgataagatgcgcgagccctccagacatacccaagcccgtggagcttgactgccgcccgaagcaggccccggcggcaaacgggaaggtcgcgccggcctccaaccagaagggctcggacaactacctagagtttgagttcttctagcctctctttggtggtgcattatggatcctccggaacagcagcgcatttgagctgaggcgccacagaaagagaaggaagatgtagagctccccctcttggcctgggaaggtactctcatttgttgtagattgtatgctcttttctggagcctcctccccaagtttttcttctttcctttttcttttccgccattgaacttgttagctctctctttagtcaaatactctctctatgcatgttaattgcgattttcggaaaccgcattgtggcggtgcctcctgaacgggtttgaaggagcgcgcctgttcaggccgtcgaatgtaaccgttatttgtaccttgtaac

SEQ ID NO: 3948 - DNA, 810 bp, Triticum aestivum
cgagtacttggccccagaaatcatcaaaggcgaaggccatggaagtgcggtcgactggtggacctttggtatcttcttgcacgagcttctatacggctagacaccattcaaggggtcaggcaaccgtgccacgctgttcaacgtggtcggtcagcagctgaagttccccgagtcgccgtcgacgagctacgccggcagggatctcatcagggggctcctggccaaggagccgcagcagcgcctcggcgtgaagaggggcgcgacggagatcaagcagcacccgttcttcgagggcgtgaactgggccctcatccggtgcagcacgccccccgaggtcccgaggcccgtcgaggctgagctgcccgtgaagtacggggtgtcggaggcggtcgcgagcaccaacaagagggtggtcggcgcggacgccaagtccagcgggaagtaccttgactttgagttcttttagagtttgcgccttagcggcggagcttgttgtttgcatactgttggtgttgttgggtcagtgtggtgttgtgattttcacggtgctgtttatgtcagtcaccgctgttacaaatttcttgcatctgaactggccgaaattagctaggtgtgtttgatctgcatcacctgatgggaatagcctgtctctgtttctgaacatgttttgcgtgctacagattttgcattgcagaaacactctgaagagtggcgtcttcggggttttgcgccatcactcggcgaatcgggcattctgactggatttaaagaatataattgtagctggtaaatgtattttagtgttgattg

SEQ ID NO: 3949 - DNA, 732 bp, Triticum aestivum
gccatcaacctgcccgagctcctcgcagaacctacatcagctcgatccatgtcattcgttgggactcacgagtacttggccccagaaatcatcaaaggcgaaggccatggaagtgcggtcgactggtggacctttggtatcttcttgcacgagcttctatacggcaagacaccattcaaggggtcaggcaaccgcgccacgctgttcaacgtggtcggtcagcagctgaagttccccgagtcgccgtcgacgagctacgccggcagggacctcatcagggggctcctggccaaggagccgcagcagcgcctcggcgtgaagaggggcgcgacggagatcaagcagcaccccttcttcgagggcgtgaactgggccctgatccgatgcagcacgccccccgaggtcccaaggcccgtcgaggccgagctgccggtgaagtacggggtgtcggaggcggtcgcgagcaccaacaagagggtggtcggcgcggacgccaagtccggcgggaagtaccttgactttgagttcttttagagtttgcgccttagcggcagagcttgttgtttgcatactgttggtgttgttgggtcagtgtggtgttgtgattcttacggtgctgtttatgtcagtcaccgctgttacaaatttcttgcatctgaactggccgaaattagctagatgtgtttgatctccatgtcctgatgggaatagcctgtctctgtttctgaacat

SEQ ID NO: 3950 - DNA, 656 bp, Triticum aestivum
gtcacgagctcccgccggaagtccgcaagcgcactttcacggcccgtcctccgtccgccgcgtgctcatgtcccgccttctcctccgagctccggccacaaatataacgtccgctccatcccgatccgcaaggacgacgaggtgcaggtcgtgcgcggcacctacaagggccgcgagggaaaggtggtgcaggtctaccgccgccgctgggtcatccacgtggagcggatcaccagggagaaggtcaatggatccacggtgaacgtcggcatccaccccagcaaggtgatcgtcaccaagctcaagctcgacaaggaccgcaaggccctcctcgaccgcaaggctcgcggccgcgctgctgacaaggccaagggaaagttcacggcggaggacgtcgccgccgccgctgggggcgccacggccaccggtgcctcgctccaggagatcgattaagcttgggatctgccggttgccatactgctcttgatatcctagttttattaccatcaccagttctgttaggatatgctatctgaagactgctttattattcgtatgatgtcgtggatgagcgttttcaaacctttaatgtgcatctttatgggtctgtgccttggattttgatatgaagacttcattatatgtttaatatctgg

SEQ ID NO: 3951 - DNA, 730 bp, Triticum aestivum
gcccccaggtaagggagagagcctaccccccgccgccgccatgaagcgcaacccccgcgtcacgagctcccgccggaagtgccgcaaggcgcacttcacggcgccgtcctccgtccgccgcgtgctcatgtccgcggccctctcctccgagctcaggcacaaatacaatgtgcgctcgatccccatccgcaaggatgacgaggtgcaggtcgtgcgcggcacctacaagggccgcgagggaaaggtggtgcaggtgtaccgccgccgctgggtcatccacgtggagcggatcaccagggagaaggtcaatggatccacggtgaacgtcggcatccaccccagcaaggtgatcgtcaccaagctcaagctcgacaaggaccgcaaggcgctcctcgaccgcaaggctcgcggccgcgctgctgacaagcccaagggcaagttcacggcggaggacgtcgccgccgccgctggaggcgccacggccgccggtgcctcgctccaggagatcgattaagctttgggatctgccggttgccatactgctcttgatatcctagttttattaccaccgcctgttctgttaggatatgcactgctactttatcattcgtaagatgtccctggatgagtgtttggaacctttatgtgcatctatcatgggtctgccttggattttgatatgaagacttcattatatgtttaatatctggttctttgtttctcgtttaga

SEQ ID NO: 3952 - DNA, 668 bp, Triticum aestivum
ccatgaagcgcaacccccgctgtcacgagctcccgccggaagtgccgcaaggcgcactttcacggcgccgtcctccggtccgccgcgtgctcatgtccgcggccctctcctctgagctccgccacaaatacaatgtccggtccatccccatccgcaaggatgacgaggtgcaggtcgtgcgcggcaccttcaagggccgcgagggaaaggtggtgcaggtctaccgccgccgctgggtcatccacgtggagcggatcaccagggagaaggtcaatggatccacggtgaacgttggcatccaccccagcaaggtgatcgtcaccaagctcaagctcgacaaggaccgcaaggccctcctcgaccgcaaggctcgcggccgcgctgctgacaaggccaagggcaagttcacggccgaggacgtcgccgccgccgctgggggtgccacggccaccggcgcctcgctccaggagatcgattaagctcggtggatctgccggttgccatactgctcttgctatcctagttttttaatatcaccagtcctgttaggatatgctacctgaaatatgctcctttatcattcgtaagatgttcgatggtgacgtttgggaacctttattaatgtgaatctatcatgtggctgtgcgttggattttgatataaagtct

SEQ ID NO: 3953 - DNA, 734 bp, Triticum aestivum
cgtccgcaacgtcgtcgacacacgcatccgaccggtgctccgcgcgctcaagcagaacctgtcgttccttgtgtccgtgctcgttgaccacgcgcagccggtggccgtgcgggaggtgatgaaggcctcgttccaggcgttcctgatggtcctcctcgccggcggcaacgaccggagcttcacgagggcggaccacgggatggtggaggaggacttccggagcctgaagcgcgccttctgcacgtgcggcgagggcctggtccccgaggacgtggtggtgcaggaggcggaggccgcagagggcgtcgttgagctcatggctcggccgacggagcaactcatcgcggcgttcggcgccgccacgtcggagtccatcgcgggcgtgcgagaatacgaggactcggacggcggcgcgaccctcgtgccgccgacgtcgaggcagtggggccccgcggatccaaacaccatcctccgcgtgttgtgccaccgcgacgacgaggccgccaaccagttcttgaagcgcacgttccagctcgccaaacggcggtgatgtcggccaaatgctccaccaatgagcctaggtgctacacattttttagtcccatcactgcaacgacccgttgcggctacgtgggctatacctgtgccggccaagtgagcggctcatgtaatatgttctggtgtgagtgtgccctgttaataaatagccgttgctagcgtcagggttgaggatc

SEQ ID NO: 3954 - DNA, 661 bp, Triticum aestivum
caccactcgctttacgacggctgttacgcgggcggcgtggccgacgcgcgcattccggccggcgctccgcacgctgaagcagaacctgtcgctgctcgtgtccatcctggtggaccgcgcgcagccggtggcggtgcgggaggtgatgaaggcctcgttccaggcgttcctgatggtgctgctcgccggcggcaaccagcggagcttcacgagggaggaccacggcatggtggaggaggacctgcggagcctgaagcgggccttctgcacgcgcggggagggcctggtggcggaggaggttgtcgagagcgaggcggaggccgcggagggcgtggtggcgctcatggggcagacggcggagcgggtggtggaggagctgagcatcgcgacgacggcggcgacggcggcgtgcggcgggtcgccccgggccgcgctgccgatgccgctgacgacgcggcggtggtgccggacggacccggacacgatcctccgcgtgctctgccaccgcgacgacgaggccgccagccagttcctgaagcgcgcgttccagctccccaagaggcggtgacgctacgctttgcgccgctatttgcagccagttgcagactctaattcgtgtggattatgtgtgtgtggtgtgggagacaaataatgatcgctc

SEQ ID NO: 3955 - DNA, 673 bp, Triticum aestivum
cgcgtaccggctcatcttcttcgactcgcaccactcgttctacgacgggctgtacgccggcggcgtggccgacgcgcgcatccggccggcgctccgcacgctgaagcagaacctgtcgctcctcgtctccatcctggtggaccgcgcgcagccggtggcggtgcgggaggtgatgaaggcctcgttccaggcgttcctgatggtgctgctggccggcggcaaccaccggagcttcacgagggaggaccacggcatggtggaggaggacctgcggagcctgaagcgggccttctgcacgcgcggggagggcctggtggcggaggacgtggtggagagcgaggccgaggccgccgagggcgtggtcgcgctcatggggcagacggcggagcgggtcgtggaggagctaagcatcgcgacgacgacggcggcggcctgcggcgggtcgccccgggccgctctgccgatgccgctgacgacgaggcggtggtgccggacggacccggacacgatcctccgcgtgctctgccaccgcgacgacgaggccgcgagccagttcctgaagcgcgcgttccagctccccaagaggcggtgacgctaggctttgcagtttgtaccgctactactgcagactcagactctattttgtgtggacaagtggattatgtgtgtgttg

SEQ ID NO: 3956 - DNA, 711 bp, Triticum aestivum
cacaggcgcatgaacatggacggaattgcagaggtgttgctagcattggaaaggattgaacaacatgatgaattgtcttatgagcaattgctggtgatggaaaccaatctattcctcagtgtccttggcttgaatgatcagcatagagatatgagaatggatattgacgacatgtcttatgaggaattattacaactagaggatagaattggctccgtgagcactgccctttccgaagagcaattggagaagtgtctcagtcgagtcgtgtataaacgagcgaatccagcgctagaagtgaacaaacctgtagtagatgatgtcaaatgcagcatatgccaggaggagtacattgaggacgaagaggttggtagaatgaagtgtgagcatcagtaccatgtgtgctgcattcaggagtggcttcgacagaagaactggtgtccgatatgcaaagcttcagcagtaccttcgccgtcggacgccgcggacaagggggatacatgaatctatgtcaaatactctctccgtcccaaaataagtgtctcaactttaacataacgttataccaaagttagtataaagtagagacagttattctgagacggtgggagtagtatgaagataccatgaaaccatgttagacatcgtaggcactgccacaaatcaaggccctccaacttgtgaatatatacatgatgaactgtttctctc

SEQ ID NO: 3957 - DNA, 723 bp, Triticum aestivum
ttaaagttcttgcctacacagcattcagtagataatcatggaggaagcccttttcagcaaatagctcttgatagcatgttcctggaatcccatcgattattgactatagcatgctactgggaatccacttcagagctcccactcacttgaagctgcccacgtcacatcagaatacacttgaaagcagtggaattacatctgcaatggattgtagcgtgccactgcattgtgaggatgcaaattcctcaaagggatttctactagttgctcacgagccaggtacgacagcaggcggttcccacatcagaggaagcatggttagagcctcagaaggtggttacgaagaagtcgatcttgttctgccgggcaccggcaggtttagagtgcagctaggggtgaacatgccggcccgagctcggaaattgctggaaagcccggacgcggtcgaggagtacgacgtcgtgctctaccttggcatcatagacatactgcaggagtacaacacgtccaagagggtagagcatgcggtcaaatcactcaagttcgaccccctttcgatatcatctgttgatccgaacttgtattcgaaacgattcgttagtttcttggagagggttttccctgagcagatcgtaaaagtagagaggcctagaacagtacatagcagtaatgggtaattttgtttttttttgttgttcttgtttttgttgtaaagaatgaaca

SEQ ID NO: 3958 - DNA, 602 bp, Triticum aestivum
agcccccgcgaccagacgtgcccgtggacacgctgagctcggggcgtgcgtggacctgctgggcgggctggtgcatatcggcctgggcgacccggtggtgaaccagtgctgcccgctgctggaggggctggtggagctggaggcggcggtgtgcctctgcaccaccatccggctcaagctcctcaacatcaacctcgccctgcccctcgccctccagctcctcctctcctgcggcaagaccccgccacccggcttcacctgctccatctagccgacctaacctgggtgagtcagtgcgccagtgcccactgcacgtggagattgatggatcatggatggatcgacatgagaggatgtcgagcgtggtcgcctactagctagtagcgagcaagaagagatcgatcgatcagcttgtttttcttgtggtttttattttgtgtttggctaggtctgtgtgttgtggtttgatgccagaggtgataatctatgtgtgctgatcaattaattggtcacaactgaggaccaactggttaagctagcaaataagaaggaaacaagtaaacagtaatagtagtaagattccatgccatgaataattcaca

SEQ ID NO: 3959 - DNA, 877 bp, Triticum aestivum
  N_region (442)..(463): n = any nucleotide
cgccggccaccattcccagtcccccggtctccgcccggttcaccgctcccccgtcgacgccgggaacactccccccgtcgtcgccggggtgcgctgcggttccagccgccagcgccagcgccgccgcgacgcagacgtgcccggtggacacgctgaagctcggggcgtgcgtggacctgctgggcgggctggtgcatatcggcctgggcgacccggtggtgaaccagtgctgcccgctgctggaggggctggtggagctggaggcggcggtgtgcctgtgcaccaccatccggctcaagctcctcaacatcaacctcgcgctgcccctcgccctccagctcctcctcacctgcggcaagaccccgccacccggcttcacctgctccatctagtcgacctaacctcggcgagtcagtgtgccacagtgccagtgcacgtggannnnnnnnnnnnnnnnnnnnnncatgagaggatgtcgatgcatggtcgtcgtctagctagtagctagtagcgagcaagaagagatcgatcgatcagctaagaatgcatcgatgagtgtttgtttttcttgtgatttttattttgtgtttggctaggcctgcgtgttgtggtttgatgccagaggtgataatcgatgtgtgctgattaattaattggtcacaactgatgaccaactggttaagctagcaaataagaagaagaaaacaagtaaacagtagtagtaagattccatgtcatgaataattcacagagctgttccagagtggccagtcgtgattggattagacatcgatcttgactaggagtatgttggtgcaagcaggcatgactgcgacagtgcatgcacggattgtatctcttttcaatgtcggtggta

SEQ ID NO: 3960 - DNA, 1044 bp, Triticum aestivum
cgcaaatctgtccgcctcccactcgcgagccacgacctcttcctcctacgccgcggccggacccgacccgctctcctccgacgccgtctccctcctgcgatctcctctacgacgagcgacgccgcctgcctcatctcctggcaccagcagcgaccccgccgctcgccgtctccgagtcctgaatagcttgctgccggtaggggccattaaccagcttctgaggaaactattcagagccagtctgcttctattccacggttgtactaggctagggtgaacctccttctccggcgaccggcctccattccagcccctcgctaccagatacagcagatctacacaggtggagatccctgtttgtgtgcggtgcactgtacctggcggtcctccatagccatggtttatcactctagtttcactgatgatgatgggatcacaaaagcctgtgggtgccctttgcttccactgaaaactcatatcaagggcccagccccagcctcagattcagataaagcggatatagtcgatgaagcgataactttcttccgagcaaatgttttcttcaaaaacttccatgtcaaaagcccagcagacaagttgcttatctatctgacatcttacatcaatattgccttgaaaagactagaaagctgccggacactggctgttggaactaaggcaatcattaacctggggttggaaactgttcctgtgcccggggaaccggggtttcctttcctggacttttcgctcttcccgaatcccaggaagaagcagaattgttgaggaactatctgaagcagataagggaggaaacaagcgggaggctgctcaactgtgcatacagagctaatggcactccaaacaaatggtggttggcttttgcaaagaggaagttcatgaaccttgtcatcctttagagtgtaattaagcatttcagctacaggttagatgtgtttttgtatatccttatttcactcggacatttatttatatgatgatgtaaataatctttcttctgaagtattcaagtataacatgcca

SEQ ID NO: 3961 - DNA, 643 bp, Triticum aestivum
tgcatgatgtagatgcaatgaaaagtatcaattatcactggctgtttgcctgtgttatttgctgattttgtgcgtatcatcacacgactcccaactttatattcctataacataggtagcttctatcttcgatgcagagtcctgaatagcttgctgccggtaggggccattaatcagcttctgaggaaactattcagagccagtcttcttctgttctacggttgtactagggtggatctccttctcacaggcggagattcctgtttgtctgcggcgcactatagctggcggtcctccatagccatggatcacaaaagcctgtgggtgtcctttcttccactaaaaacacatatcaagggcccagccccagcctcagattcagataaagcagatatagtcgatgaggcgataactttcttccgagcaaatgttttcttcaaaaacttccatgtcaaaagcccagcagacaagttgcttatctatctgacatcttacatcaatattgccttgaaaagactagaaagctgccggacactggctgttggaactaaggcaatcattaacctggggttggaaaatgtccctgtgcccggggaaccagggtttcctttacctggacttttcactcttccatttcgagatg

SEQ ID NO: 3962 - DNA, 563 bp, Triticum aestivum
ctattacagataaagcagatatagtcgatgaagcgataactttcttccgagcaaatgttttcttcaaaaacttccatgtcaaaagcccaggcagacaagttgcttatctatctgacatcttacataaatattgcattgaaaagactagaaagctgccggacactagctgttggaactaaggcaatcattaaccttgggttggaaattgttcctgtgcccggggaaccggggtttcctttccctggacttttcactcttcccgagtcccaggaggaagcagaattgttgaggaactatctcaagcagataagggaggaaacaagcgggaggctgctcaactgtgcatacagagctaatggcactccaaacaaatggtggttggcttttgcaaagaggaagttcatgaaccttgtcatcctttagagtgtaattaagcatttcagcaacaggttagatgtgtttttgtatatccttatttcactcgcacatttatttatatgatgatgtaaataatctttcttctgatgtattgaagtataaaatgcccaaacagtttcttgcaa

SEQ ID NO: 3963 - DNA, 668 bp, Triticum aestivum
tccttcatagccatggtttatcactctagtttcattgatgatgacgggatcacaaaagcctgtgggtgtcctttgcttccactcaaaacccatataaagggcccagccccagcctcagattcagataaggcggatatagttgatgaagcgataactttcttccgtgcaaatgttttcttcaaaaacttccatgtcaaaagcccagcagacaaattgctcatctatctgacatcttacatcaatattgccttgaaaagactagaaacctgccggacgctggctgtcggaactaaggcaatcattaacctggggttggaaaaagttcctgtgcctggggaaccagggtttcctttccctggacttttcactctcccccaatctggggaggaagcagaactgttgaggaactatctgaagcagataagggaggaaacgagcgggaggctgctcaactgcgcatacagagctaatggcactcccaacaaatggtggctggcttttgcgaagaggaagttcatgaacgttgtcatcctttagagcgtaagcacatcagcaacagcttaagaggcattcgtgtaaatcctgattgcacttgcacatttattcctacgatgacgtaaagattccttctcttgaagacttcaagtatacaatgctgaaaacattgt

SEQ ID NO: 3964 - DNA, 922 bp, Triticum aestivum
cctcaccccagcaccggcggcgcacagctcgacgacccgagcgatcctgcggaggcggcaggcatggtgcacgtcaacttctaccgcaactatgggaagaccttcaagaagccaaggcgtccgtatgagaaggagcgtcttgacgctgagctgaagctggttggggagtacggtctgcgggccaagcgtgagctctaccgtgtgcagtacgccctcagccgcatccgaaatgctgccagggagctgctcacctggatgagaagaacccccgccgtatctttgagggtgcagcgctcctccgccgcatgaaccgctacggtcttctcactgaggaacagaacaagcttgattatgtgcttgccctcactgttgacaacttcctccagcgccgtctccagaccatcgtcttcaagaatggcatggccaagtcaatccatcatgctcgtgtccttatcagacagcgccacatcagggttggaaagcagcttgtcaacattccttctttcatggtgagggtggacactgagaagcacgtcgacttctctctcaccagcccccctgggtggtggccaacctggaagagtgaagcggaagaaccagaagaaggcctcaggtggtggtggtgatgacggcgaggaggaggaagactaagcgcccagcctcacccgcataactttcgttgcagaaatgttgagattgccttgtggaactcggaaatgattcaaactttccttcttagaaacttagtggtgtagagcttttgttggttcagaatcttttggctgtcggttctaaaattaaacttatgtgtgtcggttttgcttggttagtgaccaccgagcagaagtgaactcttgaggctgcttcgttttttgtgaaccaaacgtatcttgtttatcgatttgacaagcctggttctgag

SEQ ID NO: 3965 - DNA, 885 bp, Triticum aestivum
gaagaccttcaagaagccaagggtccgtatgagaaggagcgtcttgacgctgagctgaagctggttggggagtacggtctgcgggccaagcgtgagctctatcgtgtgcagtacgccctcagccgcatccgaaatgctgccagggagctgctcactctggatgagaagaacccccgccgtatctttgagggtgcagcgctcctgcgccgcatgaaccgctacggtcttctcactgaggaacagaacaagcttgattacgtgcttgccctcactgttgacaacttcctccagcgccgtctccagaccatcgtcttcaagaatggcatggccaagtcaatccatcatgctcgtgtccttatcagacagcgccacatcagggttggaaagcagctcgtcaacattccttctttcatggtgagggtggacactgagaaacacgtcgacttctcgctcaccagcccccttggtggtggccaacctggaagagtgaagcggaagaaccagaagaaggcctcaggtggtggtggtgacgacggcgaggaggaggaagactaagcgctcagcctcgacccgcataacttccgttgcagaaatgttgagattgccttgtggaacttgcaacgtgaaatgattcaaactttggttcgttcttagaaacttagtggtgtagagctttcgttgcttcagctatcgattctaaaattaaacttatggttgtcagttttgcttggttagtgaccaccgagcataagaagtgaactcagtgaggctgcttcgttttttgtgaaccaaacgtatcttgttatcgattttacaggcctggttctgagttattttactctgtcactgaagtgtgtccttactgtttttctgtttcatctactc

SEQ ID NO: 3966 - DNA, 1060 bp, Triticum aestivum
  N_region (158)..(158): n = any nucleotide
  N_region (165)..(165): n = any nucleotide
  N_region (168)..(168): n = any nucleotide
  N_region (195)..(195): n = any nucleotide
gagaaaatcatggtcatgggatcaactgctttgtcaacaggcagctaatctacaactttcctgaagaactttttgctgatgctggcatcctcgcagttgagcacgctgactttgagggcatcgagcggttagctcttgtcacgggtggtgatattgcnatcaacntanttgtgacaacccagagtctagttaagncttgggcactgcaagctcatcgaagagattatgattggggaggacaggctgattcatttctccggggttgcgatggggcaagcttgcaccattgtcctgagaggagcaagtgagcatgtgcttgatgaggctgagaggtccttgcacgacgccctatgtgtgctttctcagacagtaaatgacacgcgtgtcatatttggcggtggatggcctgagatggtgatgtccaaagaggtggatgaacttgcaaggaggacccctgggaagaaatctcatgctattgatgctttttcgcgtgccctgcaagccatcccaacaatcatagctgacaatgctggtctggatagtgccgagctgatctcccagctccgagccgagcaccacaaggagaacagcactgttggaatcgacgtcatcagcggcgggctgggagacatgcagaagcgtggcatctgcgaggcgttcaaggtgaagcaggccatcgtcctgtcggcgaccgaggctgcggagatgatcctgagggttgacgagatcataacctgcgccccacgcaggagggaggacaggatgtgagatacccacgagctgttttgattgatgctgggctatctatgtatggtttgccgagttgtggctgggttaccgtgggtccacggctgctttaaagtctccatttcgattgtcgtcgaaccctggcccctaagcgactggaacttgttgttggagtagctagcgttctgtagggagtggcttcagttttctcgagttattttccactagagaatatagtgatgtgtatgctgtaaccttgttttaactgcatctttgcatgcggaggcgcttatttcagaacatgcatgcactg

SEQ ID NO: 3967 - DNA, 675 bp, Triticum aestivum
cggcgtggtgccgtacgcggcggccaacttctacgcctacgagacgctgcgcggcgtgtaccgccgcgcgtcggggaaagaggaggtgggcaacgtgccgacgctgctgatcgggtccgcggcgggcgccatagccagcacggccacgttcccgctggaggtggcgcggaagcagatgcaggtgggcgccgtgggcgggaggcaggtgtacaagaacgtgctgcacgccatgtactgcatcctcgagaaggagggcaccgccgggctctaccgcgggctcggccccagctgcatcaagctcatgcccgccgccggcatctccttcatgtgctacgaggcctgcaagaagatacttgtcgacgagaaagaagacggcggcgccgccgagccccaggaggagacggagaccggacaggcaggaggacaggcggcgcccaagagctcgaacggtgatcggccatgaactagatgaagcattatggtgaccgtcaaaatcagaagaaaatgcgtgatttgaaatttttgaagtgtagagcctattgcgattgaatcctaagctggaagtggcgccttagaagttgaatttcgttttgttcagggaacatgctccgtttcagtaatgccgtcgaatgatttatggcacctttctgtaatcaattcaataaggaagaagtc

SEQ ID NO: 3968 - DNA, 640 bp, Triticum aestivum
ctacgcctacgagacgctgcgcggcgtgtaccccgcgcgtcggggaaggaggaggtgggcaacgtgccgacgctgctgatcggtccgcggcgggcgccatagccagcaccgccacgttcccgctggaggtggcgcggaagcagatgcaggtgggcgccgtgggcgggaggcaggtctacaagaacgtcctgcacgccatgtactgcatcctcaagaacgagggcaccgccggactctaccgcgggctcggccccagctgcatcaagctcatgcccgccgccggcatctccttcatgtgctacgaggcctgcaagaagatactcgtcgacgacaaagaagacgagccccaggaggagacggagaccggacaggcaggaggacaggcggcgcccaagagctccaacggtgctcgcccatgaacgcgatgaagcattatggtgaccgtcaaaatcagaagaaaatgcgtgatttgaaattttgaagtgtagagcctagtgcgattgaatcctaagctggaagtggcgccttagaagttgaatttcgttttgttcagggaacatgctctgtttcagtaatgccgaagattgatttatggcacctttctgatcaattcaataagaaagaagtccacttttggacc

SEQ ID NO: 3969 - DNA, 661 bp, Triticum aestivum
tgccgcgtgtaccccgcgctcgggaaggaggagtggcaacgtgccgacgctgctgatcgggtccgcggcggcccatcgccagcacggccacgttcccgctggaggtggcgcggaagcagatgcaggtgggcgccgtgggcgggaggcaggtgtacaagaacgtgctgcacgccatgtactgcatcctcaagaaggagggcgccgcggggctctaccgcgggctcggccccagctgcatcaagctcatgcccgccgccggcatctccttcatgtgctacgaggcctgcaagaagatactcgtcgacgacaaagaagacgagccccaggaggagacggagaccggacaggcaggaggacaggcggcgcccaagagctcgagcggtgatcggccatgaacgcgatgaagcaaggattatggtgaccgtcaaaatcagaagaaaatgcgtgatttgaaattttgaagtgttagagcctagtgcgattgaatcctaagctggaagtggcgccttagaagttgaatttcgttttgttcagggaacatgctccgtttcagtaatgtcgtcgattgatttatggcacctttctgtaatcaattcaataagaaagaagtcccctttgggaccttcaactttgcccaaaaaaacccaaaacaccccacccc

SEQ ID NO: 3970 - DNA, 790 bp, Triticum aestivum
gagagaggagagagctccagccatggtgcacgtcaacttctaccgcaactatggtaagacattcaagaaaccaaggcgtccttatgagaaggagcgtcttgatgcagaactaaagctggttggtgagtatggactgaggtgcaagcgtgagctctggagggttcagtatgcattgagcaggatccgtaatgcggcaagacacttgctcacactggatgagaagaatccccgccgtatctttgagggcgcggctcttctccgtcgcatgaaccgctatggtctccttgctgagggccaggacaagcttgattacgtccttgccctgactgctgagaacttccttgcaaggcgccttcagactcttgtcttcaaggctggcatggcaaaatccatccaccatgcccgtgtcttgatcaggcaacgccacatcagggttggcaggcagatcgtcaatgtcccgtcgttcatggtgagggttgaatccgagaagcacatcgacttctcactgacaagtccattcggcggaggccctgcaggccgggtgaagagaaagaaccagaagaaggcaagtggtggtggcgatgcaggtggtgacgaggaagaggaatgaggaactagtagctatcaccttatatttatcaaatgttggtgttatgagtactttagctgagaggccggagactttcatgggttatcctcttgtcattttgtcactttatcactgttgttagcatgtatgcacttctttatgtttggagctatttggtcgtgatgaaagttatctaaaaat

SEQ ID NO: 3971 - DNA, 829 bp, Triticum aestivum
ggagagagctccagccatggtgcacgtcaacttctaccgcaactatggtaagacattcaagaaaccaaggcgtccttatgagaaggagcgtcttgatgcagaactgaagctggttggtgagtatggattgaggtgcaagcgtgagctctggagggttcagtatgcattgagcaggatccgtaatgctgcaagacacttgctcacactggatgagaagaatccccgccgtatctttgagggtgcggctcttctccgtcgcatgaaccgctatggtctccttgctgagggccaggataagcttgattacgtccttgccctgactgctgagaacttccttgcaaggcgccttcagactcttgtcttcaaggctggcatggcaaaatccatccaccatgcccgtgtcttgatcaggcaacgccacatcagggttggcaggcagatcgtcaatgtcccgtcgttcatggtgagggttgaatctgagaagcacatcgacttctcactgacaagtccattcggcggaggccctgcaggcagggtgaagagaaagaaccagaagaaggcaagtggtggcggcgacgccggtggtgatgaggaagaggaatgaggaactagtagctatcaccttatatttatcaaatgttggtgttatgagtactttagctgagaggcctgagactttcatgggttatcctcttgtcattttgtcactttatcactgttgttagcatgtatgcacttctttatgtttggagctatttggtcgtgatgttttcgactatgacctggaattattcttcaattgcttctgttggggtggttgtctgatagt

SEQ ID NO: 3972 - DNA, 934 bp, Triticum aestivum
aatggggaagtgatttgcgtgcgtctggtctctgatctggttcgacttctaccgcaactatggtaagacattcaagaaaccaaggcgtccttatgagaaggagcgtcttgatgcagaactaaagctggtcggtgaatatggactgaggtgcaagcgtgagctctggagggttcagtatgcactgagcaggattcgtaatgctgcaagacacttgctcacactggatgagaaaaatccccgccgtatctttgagggcgcggcccttctccgtcgcatgaaccgctatggtctccttgctgagggccaggataagcttgattacgtccttgccctgactgctgagaacttccttgcaaggcgccttcagactcttgtcttcaaggctggcatggcaaaatccatccaccatgcccgtgtcttgatcaggcaacgccacatcagggttggcaggcagatcgtcaatgtcccctcgttcatggtgagggttgaatctgagaagcacatcgacttctcactgacaagtccattcggtggaggccctgcaggcagggtgaagagaaagaaccagaagaaggcaagtggtggcggtgacgccggtggtgacgaggaagaggaatgaggaactagtagctatcaccttatatttatcaaatgttggtgttatgagtactttagctgagaggcctgagactttcatgggttatcctcttgtcattttgtcactttatcactgttgttagcatgtatgcactgctttatgtttggagctatttggtcgtgatgaaagttatctaaaaatgttcttgactatgacctggaatcctccttcaattgcttctgttggggtggttgtctgatagttcataggaatcaacctttcttttcgagtaaatgaattactttgatgatccatttgctggttcataggaatcaa

SEQ ID NO: 3973 - DNA, 653 bp, Triticum aestivum
ctttctccattgcctcgtcaagattgaacgagaggaagccccctcggagctttcccgtggtctgacgccgagtctgatagggagtggtgccatacgccgcgaccaactactatgcctacgacaccctgaggaagctctacaggaagacattcaagcaggaggagatcagcaaccttgcaaccctcctgattggttcggccgcgggcgccatctcgagcactgccaccttccctctcgaagtagctcggaagcaaatgcaggctggggcggtgggtggaaggcaggtctacaagaacgtgttccatgccctctactgcataatggagaaggaagggatgggcggcctgtacaaggggctcgggcccagctgcatcaagctcatgcccgcggcggggatctcgttcatgtgctacgaggcatgcaagaagattctggtcgaagccgaggagtagagcgaagtgcgccgccagggtcgggtccttaaagaagaggcggcaggaggattaagcctcgtctttctttctatcaagaaaagaaaattggatgatcaactactcatcagaagcttaggtcaaaggtatttgagacacgtctgttagatgaagaagttttggcctctaaattagttctgtgttcgagttgaaatccataaa

SEQ ID NO: 3974 - DNA, 1056 bp, Triticum aestivum
cgccgttggagacaattaggacacacctgatggttgggagcaatggggattcaatgacagaggtgtttcagacaattatgaagtcggagggctggacagggctgttccgtgggaactttgtaaatgttatccgtgttgctccaagcaaggcgattgagctatttgcttttgatacagccaaaaaattcctgactccaaaggctgatgagtcctctaagacccccttccctccatcacttgtcgcgggggcacttgcaggtgtcagctcaacactctgcacatatcctctggaactgatcaagacccgtctgactatagagaaagacgtatatgacaactttctccattgcctcgtcaagattgtacgagaggaaggcccctcggagctttaccgtggtctgacaccgagtctgataggagtggtgccatatgccgcgaccaactactacgcctacgacaccctgaggaagctctacaggaagacattcaagcaggaggagatcagcaacattgcaaccctcctgatcggttcggccgcgggcgccatctcgagcaccgccaccttccctctcgaagtagctcgcaagcagatgcaggcaggggcggtgggcggaaggcaggtctacaagaacgtgttccatgcgctctactgcataatggagaaggaagggatcggcggtctgtacaaggggcttgggcccagctgcatcaagctcatgcccgcggcggggatctcgttcatgtgctacgaggcctgcaagaagattctggtcgaagccgaggagtagagcgaagtgcgccaccggtgtcgggtccttaaagaagaggcggcaggaggattaagcctcgtcttcctttctatcaagaaaagaaaaattggatgatcaactactcagcagaagcttaggtcaaaggtatttgagacacgtctgttagatgatgaagttttggcctctaaattagttctgtgtccgagttgaaatccataaacaatattctgactggcggaagcagttttgtcatgctactttgcttctgtgctactaccctgtttct

SEQ ID NO: 3975 - DNA, 1099 bp, Triticum aestivum
gttgctccaagcaaggcgattgagctattgctttgatacagccaaaaaattcctgactccaaaggctgatgaatcctctaagactccctttcctccatcacttgtcgcgggggcacttgcaggtgtcagctcaacactctgcacatatcctctggaactgatcaagacccgtctgactatagagaaagatgtatatgacaactttctcaattgcctcgtcaagattgtacgagaggaaggcccctcggagctttaccgtggtctgacaccgagtctgataggagtggtgccatacgccgcgaccaactactatgcctacgacaccctgaggaagctctacaggaagacattcaagcaggaggagatcagcaacattgcaactctcctgatcggttcggccgcgggcgccatctcgagcaccgccaccttccctctcgaagtagctcgcaagcagatgcaggctggggcggtgggcggtaggcaggtctacaagaacgtgttccatgctctctactgcataatggagaaggaagggatcggcggcctgtacaaggggcttgggcctagctgcatcaagctcatgcccgcggcggggatctcgttcatgtgctacgaggcctgcaagaagatactggtcgaagccgaggagtagaacgaagcgtgatgcggggtcgagtccttaaagaagaggcggcgggattaagcctcgtcttcctttctatcaagaaaagaaaattggataatcaactactcatcagaagcttaggtcaaaggtatttgagacacgtctgttagatgaagaagtttttggcctctaaattagttctgtgttcgagttgaaatccataaacatattctgactggcggaagcagttttgtcatgctactttgcttctgtgctactctagccatgtttctcccttttatcaccggatcttggtcaatctttacagagaactgctcgcgatctttgctgaaaatagaagtgctacgacaggcagtttgatatcctggatttcatgtcactgcggttggttgaatatgtgggattatattgttttttagcgacatatgggacggagggagtataattgattga

SEQ ID NO: 3976 - DNA, 612 bp, Triticum aestivum
acccgagggcgggagacctgcagaactgtgcacggcaccgcgtcgacctgccatcttcgccacgtgcacaactacgagcgcacctgcccgctctaccagaaccagtgcgtgagcaacgagcggagccgctactcgggcaccatgaacgggaccatcttcgtggtggcgggcggcggcggcagccacctcaacggctacaccagcgccgtccccaagtggagcgtgttcagggaccgggactacggcttcaccaagctcacggccttcaaccactcctcgcttctcttcgagtacaagaggagcagtgatggcgaggtgtatgacaacttcaccatccacagggactaccgcgacgtgctcggctgcgtgcacgacagttgcttccccaccaccctcgctacctgaccgtcgagccgccatggagccaaccagcggctaataaagggagttggccctgtattttcttgtattttcatggtgtgcgcatgttgtggtctctgttcttcgcagtctgttgcgctagagtgtggaggttttctgttactgttgctgtagttgaacaacactgtgtgacgctggtgttcccagtgattatgtcgcttcaataaaaag

SEQ ID NO: 3977 - DNA, 709 bp, Triticum aestivum
  N_region (604)..(633): n = any nucleotide
ccaacaagtggtacgccgagcagggctccttcgaggagcccgaggggcgggagagcctgcagaagctgtggcagcggtaccgcgtcgacctggccttcttcggccacgtccacaactacgagcgcacctgcccgctctaccagaaccagtgcgtgagcaacgagcggagccgctactcgggcaccatgaacgggaccatcttcgtggtggcgggcggcggcggcagccacctcaacggctacaccagcgccatccccaagtggagcgtgttcagggaccgggactatggcttcaccaagctcacggccttcaaccactcgtcgcttctcttcgagtacaagaggagcagcgacggcaaggtctacgacaacttcaccatccacagggactaccgcgacgtgctcggctgcgtgcacgacagttgcttccccaccacactcgctacctgatggctcggtccagccatcatggagccaaccagcggctaataaagagagttgatcctgcattttcttaagaatggtttctgagacttgtgcttccatgatgtgcgcatattgtgctctgtgttattcacagtctgttgcactagagtgtggaggtnnnnnnnnnnnnnnnnnnnnnnnnnnnnnnaactgcactgtgagacgcatgtgttcccggtaattatatgatgttttaataaaaagctgggctagcatgagcgtag

SEQ ID NO: 3978 - DNA, 581 bp, Triticum aestivum
  N_region (505)..(528): n = any nucleotide
tcggcgacctgccctacgccaacggctacatctcgcagtgggaccagttcaccgcgcagtcgcccccatcagcgcccggaagccctacatgatcgccagcggcaaccacgagcgggaccatcttcgtggtggcgggcggcggcggcagccacctcaacggctacaccagcgccgtccccaagtggagcgtgttcagggatagagactacggcttcaccaagctcacggccttcaaccactcctcgcttctgtttgagtacaagaggagcagtgatggcaaggtgtatgacaacttcaccatccacagggactaccgcgacgtgctcggctgcgtgcacgacagttgcttccccaccacccttgctacctgatggctcggtccagccatcatggagccaaccggcgactaataaagatagttggtcctgtattttctgaatgtcccaggtgtgcgcctattgtgctctctgttcttcgcagtatgttgcgctggagtgtggaggtnnnnnnnnnnnnnnnnnnnnnnnnaactgcactgccagacgcttgtgttcccagagattatgttgttttaagaactg

SEQ ID NO: 3979 - DNA, 708 bp, Triticum aestivum
ccccttcaagacccagcccggtgtcccgctggcgcaggccagacccacgacgagatgcccgtgacctggaccagcggctacgacgtcgcgaggcctacccgttcgtggagtgggcatggtcacctccgctccgcggcgggaaccccgcccgcacccccgccggcacgctaaccttcaaccgcggcagcatgtgcggcgcgccggcgcggacgatcgggtggagggaccccgggttcatccacacggcgttcatgaggggcctgtggcccaacaaggagtacttctacaagatcgggcacgagctccccgacgggacggtggtgtggggcaagccctacaccttccgggcgccgccgacccccgggcagagctcgctgcagcgcgtcatcgtcttcggcgacatggggaaggcggagagggacgggtcgaacgagtacgccaactaccagccggggtcgctcaacacgacggacgcgctggttaaagatctggacaacttcgacatggtcttccacatcggcgacctgccctacgccaacggctacatctcgcagtgggaccagttcaccgcgcaggtcgcccccatcagcgccaggaagccctacatgatcgccagcggcaaccacgagagggactggcccaacaccggagggttcttcgacgtcgaggactccggcggcgagtgcggcgtgctggccgagaccatgt

SEQ ID NO: 3980 - DNA, 638 bp, Triticum aestivum
aagcaccagccatggctcatcttcacggcgcaccgtgtgctccggatactcctccaaacaaagtggtacgctgagcagggctccttcgaggagccccgaggggcgggagagcctgcagaagctgtggcagcggcaccgcgtcgaccttgccatcttcggccacgtgcacaactacgagcgcacctgcccgctctaccagaaccagtgcgtcaccggcgagcggagccgctactcgggcaccatgaacgggaccatcttcgtggtggcgggcggcggcggcagccacctcaacggctacaccagcgccgtccccaagtggagcgtgttcagggatagagactacggcttcaccaagctcacggccttcaaccactcctcgcttctgtttgagtacaagaggagcagtgatggcaaggtgtatgacaacttcaccatccacagggactaccgcgacgtgctcggctgcgtgcacgacagttgcttccccaccacccttgctacctgatggctcggtccagccatcatggagccaaccggcgactaataaagatagttggtcctgtattttctgaatgtcccaggtgtgcgcctattgtgctctctgttcttcgcagtatgttgcgctggagtgtggaggt

SEQ ID NO: 3981 - DNA, 853 bp, Triticum aestivum
gccgagggcgtgcacctggtgatggagctgtgcgagggcggcgagctcttcgaccgcatcttcgcccggagccactacacggagcgcgccgccgccaagatcggccgcaccatcgcgcaggtcgtgcagctgtgccacgacaacggggtcatgcaccgggacctcaagcccgagaacttcctcttcgccggcaaggaggaggactcgccgctcaaggccatcgacttcggcctctccgtctacttcgagcccggggagcggttcaccgaggtggtcggcagcgggatctacatggcgccggaggtgctcatgaggagctacggcccggaggccgacgtctggagcgccggcgtcatcctctacatcctcctctgcggagtgcctcctttctggggagacaccgatgagcacatcgccgagtccataatccggggtgaaatcaagttcgagagggagccatggcccaaggtctcccaaacagcaaaggaccttgtcaagaagatgcttgatccggatcctgctacccgcttgacagcaaagcaagtctttgagcatccgtggctcaagaacgccgacaaggctccgaatgtgtcacttggagagcttgttcgatccaggcttaagcaattctcatccatgaacaagttcaaaaagaaggcactcggagtcgttgccaagaatttaccggcggaggacatcgagaactacactcagatgtttcaaatgatagacaaggacaaggacggtactttgacgcttgaggagctcaaggagggcttgcggataaacggtcatgctgttcctgagacagagatacagatgctgttataagcgtggggacatagatggaaat

SEQ ID NO: 3982 - DNA, 871 bp, Triticum aestivum
atgttcatcttgatattgacgaggacaaagaaatcagaattgggcaccgcccctacatgcctgatgggaagccagttattggatttgttccggatatgtcaaatgttttgattgcaacaggacatgaaggaagtggacttgctttggcgctaggtactgctgaaatggtgacgaatatgattcttggtgacctggaagagtggacttcacgcctttctccatagaaaatagattttcaggaacagcatgaccgtttatccgcaagccctccttgagctcctcaagcgtcaaagtaccgtccttgtccttgtccatcatttgaaacatcttagtgtagttctcgatgtcctctgccggtaaattcttggcaagaccttcattaatcattggaaaatgattcacgtcaagaatatatcacactggaagaaaaatcaagaacatgtagcccggttctgtgcaacttactccgagtgccttctttttgaacttgttaatggacgagaattgcttaagcctggatcgaacaagcgctccaagcgacacattcggagccttgtcggcgttcttgatccacggatgctccaaagacttgctttggccgtcaagcgggtagcaggatcctgatcaagcatcttcttgacaaggtcctttgcagtttgggagaccttgggccatggctccctctcgaagttgatttcaccccggattatcgactcggcgatgcgctcatcgttgtctccccagaacggaggcactccgcagagtaggatgtagaggatgacgccggcgctccagacgtcggcctccgggccgtagctcctcatgagcacctccggcgcctgtagatcccgctgccgaccacctcggtgaa

SEQ ID NO: 3983 - DNA, 1160 bp, Triticum aestivum
cggtatctcggtgttcttcaaccccggcgatcgcttcacggaggtggtggggagcgcctactacatggcccccgaggtcctcaagcgtactacgggcaggaggtggacgtgtggagcgccggcgtcatcctctacatcctcctctgcggtgtgccgcccttctggggggacaacgacgagaagatcgcgcaggccattatccgcggcggcctcgacttcaaccgggagccctggcccagggtgtccggcaaccccaaggacctcatcaggcagatgctcgaccccgaccccgccacccggctcacggcctcgcaagttcttgagcacccgtggctgaagaacgcggacacggcgccgaacgtgtctttgggcgaggcggtgcggtctcggctgcagcagttctcggcgatgaacaagttcaagaagaaggcgctgggcgtggtggcgcggaacatgccggtggaggagctggacaagtacgtgcagatgttccacctcatggacaaggacaagaacggcaacctgtcgctggaggagctcatggagggcctccacatcaacggccagcgcgtgccggagtcggagatcaggatgctgctcgaagccgcggacacggatggcaacgggacgctggactgcgacgagttcgtgacggtgtcgctgcacctcaagaagatgaccaacgagaagtacctggcggcggcgttccgctacttcgacaaggacggcagcggcttcatcgagatcgacgagctgaggcaggagctggggcccaacgagcaggccatcctcgagatcatccgcgacgtcgacaccgaccgggacggacgcatcagctaccaggagttcgagctgatgatgaagtccggggcggactggaggaacgcgtcccgccagttctcgcgagccaacttcagcaccctcagccggaaactatgcaaagaagaaacttcctcctcgtgaattcaatttgttctacggctagatgtgattctttatgtgcatgtaagctgcagagttaacgagatcaacttaggcacgaacaaatggacgtacctggggttgtgcagtgacgagaaatgaatgaaagatattttctcacacacacaaaaaatgctactactttcatattggtgactaaccttagactactcgctccc

SEQ ID NO: 3984 - DNA, 701 bp, Triticum aestivum
gacggtcgctggcgagcgggcgtctcggctgcagcagtctcggcgatgaacaagttcaagaagaaggcgctgggcgtggtggcgcggaacatgccggtggaggagctggacaagtacgtgcagatgttccacctcatggacaaggacaagaacggcaacctgtcgctggaggagctcatggagggcctccacatcaacggccagcgcgtgccggagtcggagatcaggatgctgctcgaggccgccgacacggacggcaacgggacgctggactgcgacgagttcgtgacggtgtcgctgcacctcaagaagatgaccaacgagaagtacctggcggcggcgttccgctacttcgacaaggacggcagcggcttcatcgagatcgacgagctccggcaggagctggggcccaacgagcaggccatcctcgagatcatccgcgacgtcgacaccgaccgggacggacgcatcagctaccaggagttcgagctgatgatgaagtccggggcggactggaggacccgccagttctcgcgggccaacttcagcaccctcagccggaaactatgcaaagaagaaacttcctcctcgtgaattcaatttgttctactgctagatgtgattctttttgtgcatgtaagctgcagggttaacgagatcaacttaggcacgacaaatggacgtacctggggttgtgcagt

SEQ ID NO: 3985 - DNA, 634 bp, Triticum aestivum
  N_region (600)..(600): n = any nucleotide
atttgggatcctgaatccaggttctgatgatgagattggagtctgatcttgcacaggtcctgctatccgcatgccagaggggaactgggccaagctttcgctaacctggtcacctgaaatcgcgatggtggtcgtgatggcgagtgaagggtacctggctcttataagaagggaaccgtgataaaaaacatcgacaaggccgagcaggtttctccagctgtcaagatattccatgctgggacagctttggatggagacggcaaccttgtagctgtcggaggccgagttcttggcgtaactgcgaagggcaaggacattgaagaagcgaggtttagagcgtacgatgcggtagatgttgtcgactggccagaaggattcttcaggcgagatattggttggagggcactgaagcaggagcagacggctaactactgattagttaggtttcctaaatctggggtgagcttccatcctcaagtgaaatgaagacagtagagtcaccattgttgtggttgcggaattgacaggagcatagcttctcccgtcgaacatgagcatcttttggccatggtttggctccgaaccatttgtagcagtcangtattttccacaaagtcaggcaatgtgtcaattg

SEQ ID NO: 3986 - DNA, 774 bp, Triticum aestivum
tgtaaagtatgctctgaaggatgcaatttttggtgtgttatatccgggcttatgatagagaagaaatctggcttgcctaagcttattgaatataaatgtgcgattttggggacccaggaatgccaggttttgatgatgagattggagtctgatcttgcacaagtcctgctatccgcatgcaagaggcgaactgggcaaggtttcactaacctggtcgcctgaaatcgcgatggtggttgtgatggcgagcgaaggatacctggctcttataagaaaggcaccgtaataaaaaacatggacaaggccgagcaggtttctccggctgtcaagatattccatgctggaacagctttggatggagacggcaaccttgtagctgtcggaggccgagttcttggcgtcactgcgaagggcaaggacatcgaagaagcgaggtcgagagcatacgatgcggtggatgtcgtcgactggccggaaggattcttcaggcgagatatcggctggagggcactgaagcaggagcagacggctaactactgacttgttaggttttcctaaatccggggtcagcttcgagcgtcaagtgaaatgaagacagtagagtcaccattgtcgtggttgcggaattgacaggagcatagcttctcccgtcgaacatgagcatcttttcaccatggttttggctccgaaccatttgtagcagtcttgtgttttccacaaggcaggcaactttgtcaagtgcaattatctcttgatgtgcaataataataccac

SEQ ID NO: 3987 - DNA, 1133 bp, Triticum aestivum
  N_region (836)..(836): n = any nucleotide
  N_region (844)..(844): n = any nucleotide
ttggtgtattatatgccgggcttatgattgagaagaaatctggtctgcctaaacttattggaatataatgtgcgatttggggatcctgaatgccaggttctgatgatgagattggagtctgatcttgcacaggtcctgctatctgcatgcagaggagaactgggtaaggtttcgctaacctggtcacctgaaatcgcgatggtggttgtgatggcgagcgaaggataccctagctcttataagaagggcaccgtaataaaaaacatcgacaaggccgagcaggtttctcctgctgtcaagatattccatgctgggacagctttggctggagacggcaaccttgtagctgtcggaggccgggttcttggcgtcactgcgaagggcaaggacatcgaggaagcgaggtcgagagcgtacgatgcggtagatgtcgtcgactggccggaaggattcttcaggcgagatatcggctggagggcactgaagcaggagcagacggctaactactgattagttgggttttcctaaatctggggtgagcttccagcgtccagtgaaatgaagacagtagagccaccattgttctggttgcagaattgacaggagcatagcttctcctgtcgaacatgagcatcttttgaccatggtttggctccgaaccatttgtagcagtcttgtgttttcctcaaggctggcaacgtgtcaagtgcaattatctcttgaggtgcaataataccatcaactgattattttctagtgaacataaccacgtgagctcttcataagcatttgcttataggacctactccttccattcctaaatataaatctttttngatatttnaatatgaactacatacggatgtagtagaaattatgtggtgagctcatgacacattagaggagggacaatacatgaattcaatagtctgttgaggaacagcccatgctgccatagcctcctcttttgctattcggggttcatcgccatcactaactgatatgagcagaacattcttctcttccggggttcatcgccatccattgtcatctctttgctactatttgtatgtatggatctctttgctacttttttgtatcgatctctgtgctacttcaaggtgcagtttggt

SEQ ID NO: 3988 - DNA, 600 bp, Triticum aestivum
gtgttctgggcggagcagtaccgcgagatcgaggccaccaccgacttcaagaaccacaacctgcccctcgcccgcatcaagaagatcatgaaggccgacgaggacgtccgcatgatcgccgccgaggcgcccgtcgtcttcgcccgggcctgcgagatgttcatcctcgagctcacccaccgcggctgggcgcacgccgaggagaacaagcgccgcacgctgcagaagtccgacatcgccgccgccatcgcccgcaccgaggtcttcgacttcctggtggacatcgtgccgcgggacgaggccaaggacgccgaggcggccgtcgccgccgggatgccccaccccgccgccggcatgcccgccgccgacatggggtactactacgtcccgcagcagtaacgcctgcagtatgttacagcggacttaagttgcatctaagattgtgctgttgatttagtgctctcctatgtttgtttgttcaccgctgaataattaagatcttgtcatcatttgaggggcctcctctatgttataagtgattcgatccaagaagaatcggtgtaggttcttctgatcgaggcaggccgtatgatgctcatg

SEQ ID NO: 3989 - DNA, 1192 bp, Triticum aestivum
  N_region (170)..(193): n = any nucleotide
gccagccagccagcgagcgagcgcaatccctagcgccgaggcccattcccccgtcgtccttccccgcccattccacgatccctcggccgcggtcgggtcgccatgggaatggggccgctcgagaacgccgccgccgtcgtcgagggcggcgtcgccgccccggtggtgcnnnnnnnnnnnnnnnnnnnnnnnngaggggggtcgtacgcgctgctgcagtgcggggaggactcggcgtacgtgcgggacgcgtacgggggctacttcgaggtgttccgcgcgctgctggccgaggacggcgagcgctggcaggtgtaccgcgccgtgcgcggcgagctgccgtcggaggaggacgcggcggggctcgacgggttcgtcatctccggcagctgcagcgacgcccacggggacgagccctggatcctcgccctcgtcgacctcatccggggccagatcgccgccggcaagcgcgtctcggcgtctgcttcggccaccagatcctgtgccgggcgctgggcggcaagaccgggaggtcctgcaaggggtgggacatcggcgtcagctgcatccaccccaccgccgcggcggcgaggctcttcgcgcccctcaagatgccggtgcacctgcccatcatcgagttccaccaggatgaggtgtgggagctgcctcctcacgccgaggtgctggcccggtcagacaagaccggcgtcgagatgttccggctgggcgaccgcgccatgggcgtccagggccaccccgagtacagcaaggacatcctcatgagcatcgctgaccgcctcctccgccagaacctcctcctggactgtcaggtggacgtggccaaggcgagcttcgacgtgcggcagccggacaaggagttctggaagaaggtgtgcagggggttcctcaagggcaggctccagccgcagcagcagaagcagcagccgccgcagcaacataagcttcagctataggagtcggaggatgagacggtggcgagtccgagaagaaggccgtcaccggtgccgccggaggaggaaggaaggaggacgacatagtagcgttactgagctgggggggttgccattgcgagcgtagaattaatccttatttttctgcttcggagtttgacatcaccatcatcatcttgtacagaaacccaaccgcctatctaatcgaagcattaataaag

SEQ ID NO: 3990 - DNA, 1172 bp, Triticum aestivum
  N_region (297)..(297): n = any nucleotide
  N_region (305)..(305): n = any nucleotide
  N_region (314)..(315): n = any nucleotide
  N_region (397)..(397): n = any nucleotide
  N_region (405)..(405): n = any nucleotide
gatttattctcaaggaagatgaagataacctggatgcgctgttacttcgtggtcgagcatactattaccttgctgatcatgatgttgccaacaggcactaccagaaaggactgcgtctagaccctgaacattcagaattgaagaaggcgtattttgggttgaaaaaacttctgaagaagaccaagagcgcagaggataatgctgccaagagcaagttccgcgtggctgttgaagactacaaggcagcactagcaatggatccagaccacactatgtacaacgtacaactttatctcngggctatngtaagactnnctggttaaacttggcgagaggccaaggaggcccaatcaacagctgtacagaagcactcagcattagatgaagaaacttgttngatgcttntggcacagagaggtgaggctaaacttctaacagaagattgggaaggtgcggttgaggacctcaaagaggctgcccagaaatccccacaggacatggcaatcagagaggcgctcatgaaagctgaaaggcagctcaagctgagcaaaaggaaagactggtacaagatcctgggcatctcaaagacagcatcggccgcggacatcaagcgcgcgtacaagaggctggcgctgcagtggcacccggacaagaacgtggagaaccgcgaggaggcggagaacatgttccgagagatcgcctccgcatacgaggtacttagcgacgaggacaagcgtgtgaggtacgaccggggagaggacctggaggagatgggcatggggggaggcggcggcggctttgacccgttcggcggaggcggtgggcagcagtacacgttccaccacggcggtgggttccccggcgggggcttccccggtggcttccagttcaacttcgggtaaaaagcaggccaggcttactgtttagttttgctgtcactgctagtgagtagtgtgtcgtggtcttttggtttaggagggagagcttaacgacaacatgtgttaattatatatatctagctaagagcttttaccatcttggctcttactctggttaaagaaagttttgctttagcaccaattatacaagaaattttccgtgagatgaattgtactagtgtattatgatttatagctggcgattctgtgatgcatcggccagttgattggaaa

SEQ ID NO: 3991 - DNA, 1210 bp, Triticum aestivum
  N_region (14)..(14): n = any nucleotide
  N_region (16)..(16): n = any nucleotide
  N_region (21)..(21): n = any nucleotide
gcattcataatttntnataanaacataatctttcacagcaaacagttcatcacagccacaacatcattttgcaacaaagataatgcaaacaaatgtatccatctcttggtgtcatgggagaaatttatccattcggcttgtttattgtgccttcttttggtgcttgagaaccgaaattaggcgtgacaactggatcccaagaatcggggcggcaggcaccggggagaagtccagtacgccggaggagatcgccgacgtcgagcggcgcgtagtcttggggaggagtcggcggcggcgtcttggaggactacaaggcagcactagcaatggatccagaccatactttgtacaacgtacaacttcatcttgggctctgtaagactctggttaaacttggaagaggcaaggaggcaatcagcacctgtacggaagcactcagcatagatgaagaacttgttgaagctttgtcacagagaggtgaggctaaacttctaacggaagattgggaaggtgcggttgaggatctaaaagaggctgcccaaaaatccccacaggacatggcaatccgagaagcgctcatgaaagccgaaaggcagctgaagctgagcaaaaggaaagactggtacaagatcctgggcatctcgaagacagcgtcggccgcggacatcaagcgcgcgtacaagaggctggcgctgcagtggcacccggacaagaacgtggagaaccgcgaggaggcggagaacatgttccgagagatcgcctccgcatacgaggtgcttagcgacgaggacaagcgtgtgaggtacgaccggggagaggacctggaggagatgggcatggggggaggcggcggcggcttcgacccgttcggcggaggcggtgggcagcagtacacgttccaccacggcggtgggttccccggcggcggattccccggtggcttccagttcaacttcggttaaaagcgggccaggcttactgtttagttttcctgtcccggtctttggtttaggagggagagcttaacgacaacatgtgttaattatatatatctagctaagagcttttactgtcttggctcttactctggttaaagaaagttttgcttaagcaccaattatacaacaaattttccctgagattaattgtactacatgtattatgatttatagctggtgattttgtgatgcatcgaccagttgattggtaa

SEQ ID NO: 3992 - DNA, 1653 bp, Triticum aestivum
gaagatactgggaataaatccggagtactccaagccagaagattgcaagagatccagaaagtgacgctcatttattttgtttgtactgtttttgaaaggggtgcttaaggttagagagatattcaacttcacacaagatgatatgatgacggaagacatatttattttggactgtcattcatgtgtatttatatgggttggacaaaatgtggacacaaaaatacgtgcacaagctttgagcattggagagaaatttctagaacttgacattccaatggaaaacttatcacgagaaacaccactttatgtgatcaatgaaggaagtgagccccaatttttcaccaggttcttcacttgggattctgcaaaaacagccatgcatggcaactcatttgaaaggaggctgtctatattgaaggatggaataaaaccaagaagagataaacctaaaagaagaacaacaacatcatcgcacactggaagatcaagtgtgcctgataaatctcagcggagaagtacgtctttcagccccgatcgtgtaagagttagaggaaggtcaccggcattcaatgcattggctgccacctttgagaattcaaatgcccgaaatctatcaacccctccaccagttgcaagaaaatcattttcgaagtcttcctcccctgatcctgtgaagccaccccagagagctgcctcgatcgccgcaatgtctgcttctttcgagcggcctagacaaactctgataccaaagtcaattaaagcgagtcctgaggtaaagaaaccacaatctgaagcaagcaaacctaagccagaggaagacgccaaagaaagtacccctgctgcgaaggatgggcaaactgtgactccgacaatacaggaagatgtaaaggaggatcaacccgaagacgaggaagggcttcctacatatccgtatgatcgcttgaggacatcttcaagcaatcctgtcacagacattgatagtaccaggcgtgagacgtatctatcttcggcagagttcagggagaagtttggcatgacaaaggaggcttttgcaaagctaccaaagtggaagcagaataggctcaagatcgcactccagctcttttaaagtcttctgctgtcatatatgcagcagttaatgtctgcttggtgaaagtaaggacggcgagattgtttttcaaaggcaaatctcaaacacgaagatctctctcgcacatgtcgtaatgttaagaagagacatcggtaagtgtaagcctatctgggtcaaggggacccttggtaggcgtcggaggggctggagcagtgagttttgagctgcccatgccctggaattgtgtgttgtccactgacgaattctccatgtcgtgtgtcgggtcactgcattggtggtccggtcacacaccctaattctttcctttccaaggtcaccggtttggttgtgagcttgcaatgctttttcctcgccctctttgaaacctcaccatttgtttcattctttcatgcgtgtatggtttcctgacacaaataattatgttacatatatggtgtaagaagttaggtgatgggatgaacgccccttatgttggaaaatccaggcgatgtacgggagacgggcgtcttgcccttggaatttgatcttttaacgtggtaatt

SEQ ID NO: 3993 - DNA, 1002 bp, Triticum aestivum
gtcggacgtgttgctgtgcgtgctgccgctgttccacatctactcgctcaactcggtgctgctggcggggctgcgcgccgggtgcgcgatcgtgatcatgcgcaagttcgaccacggcgcgctggtgagcctggtgcgcgcgcacgcggtcaccgtggcgcccttcgtgccgcccatcgtcgtcgagatcgccaagagcgaccgcgtcaccgccgccgacctcgcgtccatccgcatggtcatgtccggcgccgcgcccatgggcaaggacctccaggacgccttcatggccaagatccccaacgccgtgctcggacaggggtacgggatgacggaggctgggcccggtgcttgtccattgttgcctggcggttcgcgcaagtgagccgttcggggtcaagtcggggtcgtgcggcacggtggtgcgcaacgcggagctcaagatcgtggaccccgacaccggggcctccctcggccgcaacctgccgggggagatctgcatccgcggcaaccagatcatgaaaggttatctaaatgatccggaggccacaaagaacaccattgacaaggacggttggctgcacactggagacattggttacgtcgatgatgacgacgagatcttcattgtcgacaggctcaaggagataatcaaatacaagggattccaagtacctcctgcggaacttgaagcccttctcattacacacgccgaaataaagatgctgctgtcgtatcgatgcaagatgaacttactggtgagattccagttgcattcattgtgcggattgaaggctctgagataagcgagagcgagatcaagcagttcgttgcaaaagaggttgttttctacaagaggatccacaaagttttcttcgcggactcggttccgaagagtcctgccggcaagatcctcaggaaggacctgagagcaaagcttgctgcaggcatcccaggcagtggaagcacacagtccaaaagctgagcccatcttacacacac

SEQ ID NO: 3994 - DNA, 598 bp, Triticum aestivum
gatcttcatcgtcgacaggctcaaggagatcatcaagtacaagggcttccaggtggcgccggcggagctcgaggccctcctcatcacgcacccggagatcaaggacgccgccgttgtatcactgaaggacgatcttgctggcgaagtcccggtcgccttcgttatgcggatcgaaggctccgaaatcaccgaggatgacatcaagaaattcgtcgcaaaggaggttgttttctacaagaggatccacaaggtcttcttcaccgactccattcccaagaacccttccggcaagatcctgaggaaggacttgagagccagactcgccgccggcatcccaagctaggggctgcggccgtcgtccgcttctcaggcactcagccagccagcagggtgctgttatagatcatgtaatattggtcgatctccacgaaatggtcggaggaggttgagtttgttggttcttcctacttgtgtaatgttgataaaaatgaaatgatatatgaagatgcgttgtttttgaccacaagaacaaggctggtttccaagggtacatgtatacttcttttccatcagagaatatcttgtttggatcatatca

SEQ ID NO: 3995 - DNA, 586 bp, Triticum aestivum
gacgacgacgacgagatcttcatcgtcgacaggctcaaggagatcatcaagtacaagggcttccaggtggcgccggcggagctcgaggccctcctcatcacgcacccggagatcaaggacgccgccgtcgtatcactgaaggacgatcttgctggcgaagtcccggtcgccttcgttatgcggatcgaaggctccgaaatcaccgaggatgacatcaagaaattcgtcgcaaaggaggttgttttctacaagaggatccacaaggtcttcttcactgactccattcccaagaacccttccggcaagatcctgaggaaggacttgagagccaggctcgccgccggcatccctagctaagggatgcgccgtcgtccgcttctcaggcactcagccagccagcagggtgctgttatagatcatgtaatattggtcgatctccacgaagtggtcggaggaggttgagtttgttggttcttcctgcatgtgtaatgttgataaaaatgaaatgatatatgtagatgcgttgtttttgacaacaagaacaaggctggtttccaaagggtacaatgtatacttcttttcaatc

SEQ ID NO: 3996 - DNA, 1478 bp, Triticum aestivum
cgaggcctgcgccgtggacaaggtgctggagtacgcggccggcaagggcctgcccgtggtcaccgtcgacggggcgcgcgacgggtgcgtggacttcgccgagctgatcgccggcgaggagctgccgcgggacgaggaggccgggatccaccccgacgacgtcgtcgcgctgccctactcctccggcaccaccgggctgcccaagggcgtcatgctcacgcaccgcagcctcatcaccagcgtcgcccagcaggtggacggagagaacccgaacctgtacttcagcaaggaggacgtgctgctgtgcctgctgccgctgttccacatctactcgctcaactcggtgctgctggcggggctgcgggccgggtcggcgatggtgatcatgcgcaagttcgacatcggcgcgctggtggagctggtgcgcgcgcacggcatcaccatcgcgcccttcgtgccgcccatcgtggtggagatcgccaagagcccccaggtgaccgccggcgatctcgcctccatccgcatggtcatgtccggcgccgcgcccatgggcaaggacctccatgacgccttcatggctaagatccccaacgccgtgctcggccaggggtacgggatgacggaggccgggccggtgctggccatgtgcctggcgttcgccaaggagccgttcaaggtcaagtccgggtcgtgcggcacggtggtgcgcaacgcggggctcaagatcgtcgaccccgacaccggcgcctccctcggccgcaaccagcccggcgagatctgcatccgcggcgagcagatcatgaaaggttaccttaacgacccagagtccaccaagaacaccatcgacaaggatggatggctgcacaccggagacatcggccttgtcgacgacgacgacgagatcttcatcgtcgacaggctcaaggagatcatcaagtacaagggcttccaggtggcgccggcggagctcgaggccctcctcatcacgcacccggagatcaaggacgccgccgtcgtatcactgaaggacgatcttgctggcgaagtcccggtcgccttcgtgatgcggatcgaaggctccgaaatcaccgaggatgacatcaagaaattcgtcgcaaaggaggttgttttctacaagaggatccacaaggtgttcttcaccgactccatccccaagaacccttccggcaagatcctgaggaaggatttgagagccaggctcgccgccggcatccccagctaggggctgcggccgtcgtccgcttctcaggcactcagccagccagcagggtgctgttatagatcatgtaatattgtttgatctccatgaaatggtcggaggaggttgagtttgttggttcttcctgcttgtgtaatgttgataaaaatgaaatgatatatgtagatgcgttgttgttgaccacaagaacaaggctggcttccaaagggtacaatgtatacttcttttccatcagaga

SEQ ID NO: 3997 - DNA, 1246 bp, Triticum aestivum
  N_region (110)..(234): n = any nucleotide
gacggacggcatagcgtagggaggggatccatccagcagagtagaggagagcagcgaccggtcggagcagagcagtggcggcccactgggtcggtcggcatggattaccnnnnnnnnnnnnnnnnnnnnnnnnnnnnnnnnnnnnnnnnnnnnnnnnnnnnnnnnnnnnnnnnnnnnnnnnnnnnnnnnnnnnnnnnnnnnnnnnnnnnnnnnnnnnnnnnnnnnnnnnnnnnngagcagctgtgcttcgtggggaggggcggcgggtgtcggggggcggagaggaagcggcggttcacggaggagcagacacggtcgctggagtccatgttccacgcgcaccacgccaagctggagccccgggagaaggcggagctggcgcgcgagctgggcctgcagccgcgccaggtggccatctggttccagaacaagcgcgcgcggtggcgctccaagcagctggagcacgacttcaccgccctccgcgccgactacgacgccctccactcccgcgtcgagtccctcaagcacgagaagctcgccctcgccgcacagttgcaggagctgagcgagaggctgagggagagggacggcggcggcggtggcgcggcgaccgccaccgccagcagcagcagctgcaacggaggcggccgggagctggacgacgacaagaggaacgtcgtcgacgtcgagccccccgagagctgcgtgctcggcgggacggcgtgcggcacgccggcggacgtctcggcgtcggtggagtccgagtgcgacgaccacctccactacgacggggcggtcttcccggagtccttctgcgccacgccggagctgtgggagccgtggccgtggccgcccgtcgagtggaacgcggtggcttgaggccctggagtagtatatacatgttgtgaacccacgtaggcggcttgtgtgtgtagcttcacgtacgtacgtgcatgttgtgctcgatttcccatctggttggggatacatgcgagagaggcgaacgggggcgcggcaatgacgggtgggtccgtgtaagacagagggtgatgcacctgaatccagagaagtgacctgaaaccatggaggcgaccgcccagccaatgggatcagggattcggatgctgctaaaatgttgcgagttagagatcattggtggagtttgcatcagctgttctgtttgttgttgcacccgctgtgaattcaaatgttggaggtaggaccgatccatcattgataatactac

SEQ ID NO: 3998 - DNA, 593 bp, Triticum aestivum
tcggtgggctgttcctgacgcactgcgggtggaactcgacgctggagagcgtgtgcgccggcgtgccgatggtctgctggcccttcttcgccgagcagccaaccaactgccggtacgcgtgcgccaagtggggcatcgggatggagatcggtggcgacgtggcgagggaggaggtggcgcggctggtgcgcgaggccatggacggcgagaggggcaaggcgatgagagcgagcgcgacggcgtggaaggaaagcgccagggcagcgacgggggcaggtggctcgtcgagcgagaacatggatcggctggtcgagttcttgcgtgccgggtgtgatggtgctacctgaatgagttatacgggtgtgtttggtagcatgcatggacctagtctagttgttcttctctgatacatgttgaacgtagacatgctcagttcatgtatactagatcgttatcacgccttggcgcgagggtgccggtccaaccgacatgaccaagcgatggaagatcaaaccacatgatgcattagcaaaaagcatgagtaggaacgcatgatgcacaaccgattttctggttcaaggaaaagaataaat

SEQ ID NO: 3999 - DNA, 1521 bp, Triticum aestivum
aggatgtttttacaacacccgaagtggtgccacttggacataatttacttatcacataccgcaagcttctcaatcatgctcaggtgtttgatctacttgatgaaactccagacaaagtcttacacaaactctacaacaacgtggaaaggctcaagcgtgatggggatactcttgcttctgaaatccataggaggttgaggctaatagttgctggaggcgatggaacagccggttggttgcttggagttgtatctgatctcaagctagttcatccacctcccgttgctacagttcccctgggaactggaaataacctgccatattcttttggatggggcaagagaaatcctggcacagatcgtgagtctgtcatatccttcctaaagttggtaaaagaagcaagagagataaacattgatagctggcatactgtcatgagaatgaaatgcccaaaacgttctccttgcgatccaattgctccttctgatttgccgcattctctgcatgcatttcaccgtgtgccaaagacagatccagaagatatggaatattcttacacatatcgtggagggttttggaattatttcagtatgggaatggatgcacaagtgtcttatgcatttcattctcagaggaaattgcacccagagaaattcaagaatcagttgtctaatcagaaacagtatttgaagctggcatgcacacaaggatggttctgtgcctctttaagccatccaatgtcacggaatattgctcaccttgcaaaggtaaagataatgaagaaatctggaaaatgggaaaccttggaaattccacagagtatccggtccattgtctgtctcaatttacccagcttttctggtggactgaatccctggggaacaccaagtaagaggaagcaaagaaaaagagacttggtactgcctccacttgtggatgatggccttctggagattgtgggtttcaaagatgcttggcatggccttgtattgttatctccgaaaggccacggcactcgtcttgctcaggcccatcgtgtccgattcaaatttcaccggggtgcaactgaccatgcctacatgagaatcgacggtgagccctggaagcagcctcttccacaggaggatgacggcaaggttgtcgtggagatatcccacgctgggcaggtcaagatgctcgcaaccaaggactgtatagccaaaggcatcaacgactcccctatgtcaacaacctgcacagattccagctccagcgatgactcggacgatgacttcacagaggagcggaggaacttcggggccgccttgtcgttccggtacatgaatgatgtgaaaaaaacagtagaagcttgaatctctaactgggccctgtacagtttgtcctgcgtaggagatagatcgttgcactgattttgtcgagcagtggacgttgcccctgtaagatccttttgctggcaaggctgtttgtgtatggcaaagttgttgtggcgtactggtgcaggtgggtttttacttacgtggc

SEQ ID NO: 4000 - DNA, 1045 bp, Triticum aestivum
  N_region (138)..(138): n = any nucleotide
  N_region (295)..(295): n = any nucleotide
tcgcgcgccccccgactacaacgaccgcgccccaagtcccccccaaatgacggaccaaggagagggatgactacaacgtgagcgagacgacttcagcttcgggaacaggggcgcgctggaccgggacgcgagccggcngacgataaggccatgacggcggacccgaacaatgcgatgggccggggccgacggcgatgccgccgacgagcgtgatgacgcggctgatcctgatcatggttggcgcaagctcatccgcaaccccacacctactccagcctcatcgcactcatctgtncgctcgtctgcttcaggtggaacttcacgatgccggcaatcgtcctgggatccatctccatcctgtcggatgcggggctaggaatggccatgttcagcctcggtctgttcatggcgctgcagccgcggatcatcgcgtgcgggaacaaggtggcgacgtacgccatggcggtgcggttcctcgccgggccggccgtcatgaccgccgcctccttcgccgtgggcctccgcggcacgctcctgcacgtcgccatcgtccaggccgcgctgccgcagggcattgtccccttcgtcttcgccaaggagtacagcgtgcaccccgacatcctcagcacggcggtcatattcggcatgctcatcgccctgcccatcacgctcgtctactacatcctgctcggcctgtgagcgggcgccgcatgtaaagatccgtcgcttcgctaccgcaggctcaggagcggcagaggaggaggaggacgcgtgcttggagcacgaggggggctcttcatttttcttcccctctctctctctagagcagcaggataatggcggcgctcctagctaggtaggacaatggcgagagttgatcaacgacactcagaagggcacgggaagaagaaagtgcaagtacagagaagcttgggcggggggcaggggtcgggttcaggtcgcggaatggctgggttgtgaaagcggtttgcgagttttggtgcctgacccctgtaaaatggatgccgttctgatagtaactgac

SEQ ID NO: 4001 - DNA, 713 bp, Triticum aestivum
aaagggagtatgcctgagatcttcaagagtggagcaactcccatcctggttgcaactgacgtgcttgctcgtgggcttgacataccagatgtcgcccacgtcatcaattttgatctgccaaatgacatagatgactatgttcaccgcattgggagaactggtagagctgggaagtctggtctggcaactgcatttttcaatgagggcaacatgtcactggccaggccattgtgtgaactgatgcaggaagccaatcaggaggttcctcagtggctggagcgctattctgcccgttcctcgtttggaggcggcggaggaggcagaaaccgcaggtcaggaggcggcggcggtgctcgatttggtggacgtgacttccgtcgcgacacgaggggcggcggcggtggaggaggtggtggctatggcggcggtggcggtggcggttaccgttgttggtgcgaggttatgtgtggaggcgcttctagctcgtgggactgatgggttcacctggtaatggtgagaattgaatgaaagtgatggatggatggtattctattgacttagctgaaaacagatattggggtttgtagtcaccgtggtgtgggtatggtgcccttgcccccatttaccttattttgtgcctggttgttgtcaccgcacttgtgtttcccctgtactggttattttctgactggcatcaaagtccgggtgggcta

SEQ ID NO: 4002 - DNA, 699 bp, Triticum aestivum
gctgagatccttcaagagtggagcaactcccatcctggttgcaactgacgttgctgctcgtgggcttgacataccagatgtcgcccacgtcatcaattttgatctgccaaatgacatagatgactatgttcaccgcattgggagaactggaagagctgggaagtctggtttggcaactgcatttttcaatgagggcaacatgtcactggccaggccgttatgcgaactgatgcaggaagccaatcaggaggttcctcagtggctggagcgctattctgcccgttcctcgtttggaggcggcggaggaggcagaaaccgcaggtcaggaggtggtggcggtgctcgatttggtggacgtgacttccgtcgcgacacgaggggcggcggcggtggaggaggtggtggctacggcggtggtggcggttacggttgtagtggaagttatggtggaaggcgcgtctagctcgtgggactgatgggttcacctggtaatggtgagaaattgaaacgaaaccgatggatggatggtattctattgacttagctgaaaacagatattggggtttgtagtcaccgtggtgtgggtatggtgcccttgcccccatttaccttattttgtggctggttgttgtcaccgcacttgtgtttcccgtgtactggttattttccgactggcgtcaaagtccgggtgggctaatt

SEQ ID NO: 4003 - DNA, 945 bp, Triticum aestivum
  N_region (88)..(112): n = any nucleotide
cgctgtcggagatgtaccagagcgcgcggcggctgctgctgtcggcccgcgacggcgtgtcccttgtggagcggctcgcctcggcgcnnnnnnnnnnnnnnnnnnnnnnnnnggcgccgctcgtcggcgcgccggacccggcgggcgccgaggccgtgcgcagggaggtggcgcagatccagggcctctgcgcgcagatggaccgcctctggcgctccatccccgccaagggccagcgcgacctctggaagagaaaagtggagcagctatctgaagaggttgattcattgaaggaaaccctcgacaagcactcattgcggcaacgaaagcggattttggaagccaaggaaagggcggagctatttgagagagctaatggtgagtcgtcgcatgtccttcaaatatttgacgacgaagcccaggcaatgcaatcggcccgcagctcctctcgaatgcttgacgaagcctttgagacaggagtggccatcctccacaagtactctgaccagagggatcgtctgaagagcgcgcaaaggaaggccctagacgtcctgaacaccgttggcctgtcaaactcggtcttgaagctcatcgaaaagcggcaccgagtcgacaagcggattgcgtacggtggcatgatcattaccgtcgtgctgatggttgcgttattggcgatggacacactagtttttcaatgttctctagaggtgggcacactagtgcatgaggaattaaggaaggggggttgttgttcagtttaaagtttgctagctctggtccttccttgtgtagtaggcacaactctgcccgcccggttactgatctatcttctttgtattactatcatatatactgtgtgtatagcgattatggaaagatgttgacaagtctcagatcagatgtattcttctgtatgcacagtacagtggcatgttttgttaccat

SEQ ID NO: 4004 - DNA, 606 bp, Triticum aestivum
  N_region (99)..(99): n = any nucleotide
agcttttgaatggagtatcgcatacaacacattggcacttgacctcaaagcgacaatttacttgttaattaagggatcctcagcgtccaatatgcaagnttggtgaccttgggctttcaaaagtcaagtgtcagaccctcatctctgtggtgtgaggggaacgcttccatggatggccccagagcttctgaatggaagcagcagcctggtctctgaaaaggttgatgtcttctcctttgggattgtcctgtgggaactcctcacaggagaggaaccatatgcagatttgcattatggtgttatcattggtggcattgtgagcaacactctgcggccgcaggtgcctgactcatgcgacccagagtggaggtcgctgatggagcatgctgggcgacagaaccgtcggaacggccagcttcacccagatcgccgtcaggtcagtctgaagaatgtggtgatgaactggttgtgtaatctgggtggtgtaatacagtttttgggaactgtcagttgaggtcctatattgcttgtatatgcttggtttttcgtgtgtttgttatgtataccgaaatggttcggtgtcgctgtaaaaagggtccagttgtt

SEQ ID NO: 4005 - DNA, 1193 bp, Triticum aestivum
ctttgctgaagaattccaagagcctggatcgacgcaaacggctaattattgccatggacacagcttttggaatggagtatctgcataacaaaaacattgtgcactttgacctcaaaagtgacaatttacttgttaatttaagggatcctcagcgtccaatatgcaaggttggtgatcttgggctttcaaaagtcaaatgtcagaccctcatctctggtggtgtgaggggaacgcttccatggatggccccagagcttctgaatggaagcagcagcctggtctctgaaaaggttgatgtcttctcctttgggattgttctgtgggaactcctcacaggagaggaaccatatgcagatttgcattatggtgttatcattggtggcattgtgagcaacactctgcggccgcaggtgcccgactcatgcgacccagagtggagtcgctgatggagcaatgctgggcgacggaaccgtcggaacggccaagcttcacccagatcgccgtcaggctgcgcgcaatggcagcgtcccagaaggtgcaatcctagtagcgccagcagtggtcttgaaaaaacttctggggccatccatccgtcttggacaagttcgtcttcgcatattgcgtattttaggaaatccggtgctgagatatataaatattatatatatggcttggtctcgttctttcatagcgtcggtcggtcggtccctagggtctatctatctgttcataccccttcagttgtttcataccttgtaatcataaatcatcagccctccctcccaacctccccgtgtctagaagtgtcggtcggtcgtcgtcccagatccgtattcatgtcgatgtgatacccttccccttttggctttggcttaagaggcgcgctgaataagccagtcttattgtctagtttatacgagagtcccgatatcttttattgttattgtgtcctttcccctttctgtgctcgcccgtgcgcttcgtgctctgtgcggctatatgaatgcgtagttcgtggttgtggtaaagttcgcttgtgtcgcgatctaggtctacggtctaggtctagtctgtaagatatgtggtgatgaactaggttgtgtaatctgggtggtgtaataacaagtttattgggaaactgtcagattgaggtcctatattgcttgtatatgacttggtttttcgtgtgtttg

SEQ ID NO: 4006 - DNA, 796 bp, Triticum aestivum
  N_region (617)..(644): n = any nucleotide
caatgtgctcttcaagcaacatccaggacatgctgacggtgacagtgcagtgctcgctgagaccgggactcctggttcaactgccagaagctgaagctgcccgagggctgcgggtatgaattccaaatgcagtatggctcgattggatggtcggtgggtgcattgctcgggtacgcgcaaggcgcaagcgaaaagcgtgttatagcctgcattggtgatgggagcttccaggtgacagcacaggatgtgtcgactatgctgcggtgcgaacagaacagcataatcttcctgatcaacaatggcgggtacaccatcgaggtggagatccacgacggaccttacaacgtcatcaagaactggaactacaccgcccttgtggaggccatccacaacggggagggcaaatgctggactgccaaggtgaagtgcgaggaggagctgacggcggcgatcgagatggcgctgggggagaaggaggactctctctgcttcatcgaggtgatcgcgcacaaggacgacaccagcaaagagcttctggaatggggctccagggtctctgctgccaactccaggccacccaatccccagtagacagaccgaccaaagccacgcctgcnnnnnnnnnnnnnnnnnnnnnnnnnnnncgcacgttgcccatcaaataatgttgaacagtttatctttgctcttctgttatgttcttagttttgtgccttgtagtgacttgtgccatcgcctgtgttctatcctgccaatgctacgaagattatgagatatttttagcttccctcagcta

SEQ ID NO: 4007 - DNA, 930 bp, Triticum aestivum
atttgggtgtgttctgatgaaggacttcctgcatgcacttggaacccggctgaagaagaacacagctgcctacgacaactacagtcggatttttgtgcctcagggcgaacccctttcctctgcgcctggagagcctttgagagtgaatgtacttttcaagcatattcagaaaatgctgtctggcgactcagctgttatagcagagactggggactcatggtttaactgccagaagctgaaactgccagaaggctgtgggtatgaatttcagatgcaatatggatcaattggttgggctgtgggtgcaactctgggatatgcgcaggctgctaagggtaagcgagtcatttccttcattggagatggcagctttcaggtgacggcacaagaagtgtcgacgatgctccggtgggaacagaacaacatcatctttctcataaacaacgggggttacaccattgaggtggagatccatgacggcccttacaacgtcatcaagaattggaactacaccggcgtggtggaagcattccataatggcgagggcaagtgctatacggccaaggtccgaacagaggaggaactgaagaaggcaattgaggcatccctaggacccaacaaggacagcctgtgctttatagaggtaattgttgcacaaggatgacactagtaaagagcttcttgagtggggttctagggtttccgccgcgaatagccgcccaccaaatccccagtgacacatcaggtctccacaagatcctcatccagcttaatgatgtcatgtggaagttctgaatagatgttactgttctctgaataaatcatccatttgagtccattgctgttgcaagtgctcatggttactgtacatagatggtcttagttcaggaacctgtgcttgtatattacttcaataaatctgaaatcgat

SEQ ID NO: 4008 - DNA, 1193 bp, Triticum aestivum
cctatttgtttgctggcccgatatttaatgactacagctcggttgggtactcgcttcttctcaagaaggagaaggccatcattgtccagccggaccgagtcgtgattgggaatgggcctgcatttgggtgtgttctgatgaaggacttcctgcatgcacttgcaacccggctgaagaagaacacagctgcctacgacaactacagtcggatttttgtgcctcagggcgaacccctttcctctgagcctggagagcctttgagagtgaatatactttttaagcatattcagaaaatgttgtctggcagctcagctgttatagcagcagactggggactcatggtttaactgtcagaagctgaaactaccagaaggctgtgggtatgaatttcagatgcaatatggatcaattggattgcgtcctgtgcggatgctactactgggagatagcgcatggctgctaagcgataaagcgagtcatttccgtatcagttggagatggcagctttcaggtgacggcacaagaagtgtcgacgatgctccggtgggaacagaacaacatcatctttctcataaaccacgggggttacaccattgaggtggagatccatgacggcccttacaacatcatcaagaactggaactacaccggcgtggtggaagcattccataatggcgagggcaagtgctatacggccaaggtccgaacagaggaggaactgaagaaggcaattgaggcatccctaggacccaacaaggacagcctgtgctttatagaggtaattgtgcacaaggatgacactagtaaagagcttcttgagtggggttctagggtttctgccgcgaatagccggccaccaaatccccagtgaacgcaccaggtcaccaaagatcctcatccagcttaatgatgtcatgtggaagttctgaatagatgttactgatctttaaataaatcatccatttgagtccactgctgttgcaagggctcatggttgctgtacatagatggtcttagttcaggaacctgtgcttgtatattacttcaataaatctgaaatcgatgtcatagccagctaaagacgcccttgattttggcatctttcttgattttgacaacagtttcaggcttgttgtgtttctgaaaagcatttgtaagacaaaacaagttgcgtttctagaatgcgaataaga

SEQ ID NO: 4009 - DNA, 1735 bp, Triticum aestivum
tcgacgagcccggctgcgcctcgtcggctgctgcacgagctcacgcggggtacgcgccgacggctacgcgcggcccgcggcgtcggcgcctgcgcggtcaccttcaccgtcggcggcctcagcgtgctcaacgccatcgccggcgcctacagcgagaacctgcccgtcatctgcatcgccggcgggcccaactccaacgactacggcaccaaccgcatcctccaccacaccatcggcatcccggacttctcacaggagctacgctgcttccagaccgtcacctgccaccaggcggtggtgaccaacctggacgacgcgcacgagcagatcgacacggccatcgcgacggcgctcagggagagcaagccggtgtaccttagcatcagctgcaacctccccgggctacctcaccccacctttacccgtgacccagtccccttcttcctcgcccccaggatgagcaacaagatggggctcgaggctgcagtggaggcaactgtcgagttcctgaacaaggcggtgaagccagtgcttgtggccggccccaattgcgcgtggcgaaggcggggaaggccttcgtcgacctcgtggacgccagtgggtatgcctatgctataatgccatcggccaagggctttgtgccagagacgcacccccacttcctcggcacctactggggcgccgtcagcaccgccttctgcgccgagattgtggagtcggccgacgcctacctcttcgcaggccctatcttcaacgactacagctctgttggctactcgttcctgctcaagaaggacaaggccatcatcgtgcagcctgagcgtgtcatcgtcgggaacggcccggcattcggctgcgtcatgatgaaggagtacctgtctgcattggccaagcgggttcagaagaacaacactgcctacgagaactacaagaggatcttcgtgcctgagggccatccgctgaagggcgaggcgaacgagccgctgcgtgtcaatgtgctcttcaagcacatccaggacatgcttacgggtgacagtgcagtgctcgccgagaccggtgactcctggttcaactgccagaagctcaagctgcccgagggctgcgggtatgaattccaaatgcagtatggctcgattggatggtcagtgggtgcattgctcgggtacgcgcaaggtgcaagcgacaagcgtgttatagcctgcattggtgatgggagcttccaggtgacagcacaggatgtgtcaactatgctgcggtgcgaacagaacagcataatcttcctgatcaacaatggcgggtacaccatcgaggtggagatccacgacgggccttacaatgtcatcaagaactggaactacaccgcccttgtggaggccatccacaacggggagggcaaatgctggactgccaaggtgaagtgcgaggaggagctgacggcggcgatagagacggcgctgggggagaagaaggactctctgtgcttcatcgaggtgatcgcgcacaaggacgacaccagcaaagagcttctcgagtggggttccagggtctctgctgccaactccaggccacccaacccccagtagaccaagcaaacttgcctgcatcagtagtagtagcagcagcagaacgcacgttgcccatcaaataatgtggacagttatctttgctcttctgttatgttcttagttttgtgcctactagtgacttgtgagactgtaggccatcgcctgtgttc

SEQ ID NO: 4010 - DNA, 996 bp, Triticum aestivum
ctgttggctactcgttccctgctcaagaaggacaaggccatcatcgtgcagcctgagcgtgtcatcgtcgggaacggcccggcattcggctgcgtcatgatgaaggagtacctgtctgcattggccaagcgggttcagaagaacaccaccgcctacgagaactacaagaggatcttcgtgcctgagggccatccgctgaagggcgaggcgaacgagccgctgcgtgtcaatgtgctcttcaagcacatccaggacatgctgacgggtgatagtgcagtgctcgctgagaccggtgactcctggttcaactgccagaagctcaagctgcccgagggctgcgggtatgaattccaaatgcagtatggctcgattggatggtcagtgggtgcattgctcgggtacgcgcaaggggcgagtgacaagcgtgtcatagcctgcattggtgatgggagcttccaggtgacagcacaggatgtgtcaactatgctgcggtgcgaacagaacagcataatcttcctgatcaacaatggcgggtacacgatcgaggtggagatccacgacgggccttacaatgtcatcaagaactggaactacaccgcccttgtggaggccatccacaacggggagggcaaatgctggactgccaaggtgaagtgcgaggaggagctgacggcggcgatagagacggcgctgggggagaagaaggactctctgtgcttcatcgaggtgatcgcgcacaaggacgacaccagcaaagagcttctggaatggggctccagggtctctgctgccaactccaggccacccaacccccagtagaccaagcacgcctgcatcactagtagtcgcatccagcagcacgttgccatcaaataatgttgaacagtttatctttgctcttctgttatgttcttagttttgtgcctactagttacttgtgagctgtggccatcgcctgtgttctatcctgccaatgctaagaagatcatgagatat

SEQ ID NO: 4011 - DNA, 709 bp, Triticum aestivum
acaagttccctgatgcacatgtggatgaattcaaatcaatcgagaaattcaagatcttcaacactaacaacctatggggtgagcttgaaggctatcaagcgccttgtcgaggctgatgccctcaagatggagatcattccaaacccgaaggaagttgagggcgtgaaagtccttcagttggaaactgcagctggtgccgcaatcaggttctttgaccacgcaatcggcatgaatgttccgaggtcccggttcctaccggtgaaggcaacatcagatttgcagctagtgcagtctgatctgtataccttggtcgatggctttgttacacgtaatgcagctagaacaaatccatcaaatccctcaattgaacttggccctgagttcaagaaggttgggtgcttccttggccgcttcaagtcgattcctagcattgttgagctcgacagcttgaaggtttccggtgatgtttggtttggttctggcatcgtgctgaagggcaaggtgaccatcacagcaaaacctggtgttaagctggaaatcccagatggaaaagtgattgagaacaaggacatcaacggccctgaggacctttaaatgagcatcagaacatgctgactttacaatggcagatcgattttactatatagaatctgctatgagtcatacatgcaccatgacattgtggtgaatatctgtgatacagttgctt

SEQ ID NO: 4012 - DNA, 723 bp, Triticum aestivum
ggttcctgatgcacatgtcaatgagttcaagtcaattgagaaattcaagatcttcaacaccaacaatctatgggtgagcttgaaggctatcaaacgccttgtcgaggctgatgcactcaagatggagatcattccaaacccgaaggaagttgagggcgtgaaagtccttcagttggaaactgcagctggagccgcgatcaggttctttgaccacgcaatcggcatgaatgttccgaggtcccggttcctaccggtgaaggcaacatcagacttgcagctagtacagtctgatctgtataccctggttgatggcttcgttacacgtaatgcagctagaacaaatccatcaaatccctcaattgaacttggccctgagttcaagaaggttgggtgcttccttggccgcttcaagtcgattcctagcattgttgagctcgacagcttgaaggtttccggtgatgtttggtttggttctggcatcgtgctgaagggtaaggtgaccatcacagcaaaacctggtgttaagctggaaatcccagatggaaaagtgattgagaacaaggacatcaacggccctgaggacctttaaatgagcatcagaacatgctgacatcacaatggcagatcaattttactatatagaatctgctatgagtcatacatgcaccatgacattgtggtgaatatctgtgatacagtttgcttcaacataaatacattgaa

SEQ ID NO: 4013 - DNA, 551 bp, Triticum aestivum
  N_region (285)..(307): n = any nucleotide
cagggacccgtcgccggcggcgaggtgggcctggtggagggcggcgtgcggcgctgcacgcactgcgcctcggagaagacgccgcagtggcgaacggggccgctggggcccaagacgctgtgcaacgcgtgcggcgtgcggttcaagtcaggacggctggtgccggagtaccggccggcggcaagccccacgttcctgctgacgcagcactccaactctcaccgcaaggtgatggagctgcgccgccagaaggagctcgttctcatccgcggcagccaccgtctnnnnnnnnnnnnnnnnnnnnnnngccccggccccggggtgaccgtgaagccggagctcatgttccatgactacggcatatgttgatcgcttgagccggccgtacggatgtactcctagctagttagccgtgcatcatcgcgcgcccgcgcagcctagctagctagctagatccctttgcaaaattctcaggcctccttttcttcacttttcgcctttttttctcttcatatattttgcatctttttgttaattaatttgttggtacc

SEQ ID NO: 4014 - DNA, 1019 bp, Triticum aestivum
  N_region (287)..(304): n = any nucleotide
aactgtcgcccaccaccccgtccgccacgtcgtcggatcaccagacgtccatgctctccttcgccgacgagttctacatacctagcgaggaagctgcggagctcgaatggctatccaagttcgtgggacgactcctactcggacatgccgaattactcatcggccgcgcatgcggcaatggcggcggctaacgcggcgaacaacggcggtggcagctcggctggtcaagacagctgcgtcacagcggtgccagccgcggagcgcgaagcaagcggtcgcgcgcgagnnnnnnnnnnnnnnnnnnatggcactccctcatgccgcacccgccttcgcagccatcgccctcgtcctcgtgttcatcgtccgacttcccgtcctcaacgacggcacgacctagcggctccaactgcggcggtcgcggcaagaagcatggacccgttgccggcgcggaggtgggcctggtggagggcggcgtgcggcgctgcacgcactgcgcgtcggagaagacgccgcagtggcgaacggggcccctggggcccaagacgctgtgcaacgcgtgcggtgtgcggttcaagtctggacggctggtgccggagtaccggccggcggcaagccccacgttcctgctgacacagcactccaactctcaccgcaaggtcatggagctgcgccgccagaaggagctcgttctcatccgcggcagccaccgtctggacgcggtggcggcggctggccccggccccggggtgaccgtgaagccggagctcatgttccatgactacggcatatgttgatcgcttgagccggacgtacggatgtactcctagctagttagccgtgcatcatcgcgcgcctgcacgcagcctagctagctagctagacccctttgcaaaattcccaggcctccttttctcacttttcgctttttccccatatattttgcatctttttgttaattaatttgttggtacctacctcccttccaagttctactacgagtgatgaatatcaagatc

SEQ ID NO: 4015 - DNA, 934 bp, Triticum aestivum
gccagcactacgacagagttagggggtgggttggtttctctgtcaggttggctcatcgtatgaccgcaggagctgatatactgttgatgccgtcaaggttcgagccttgcgggttgaaccagctctatgcaatgatgtatgggaccgtgcccgtggtgcattcggtgggtggccttcgagacactgtccagcactacaatccatatgaggaggttgggcttggttggacttttgaaaatgcggaagcaaacaggatgatcgatgcgctggggcactgcctgaacacgtacaggaactacaagtctagctgggagggactccggaggagagggatgatgcaggacctgagctgggacactgctgctaaacgctatgaggaggttcttgttgctgccaagtatcagtggtgactggggaatggatccacgagcctactgatggttgtcattcacagactggaagacactcttgtgtgtttgcccagtgtcctaagtagagcatgttggttgaaactggaagacgaaatctttcctgtcagagcccaagtcattctcagcaatgcaactgttagcctacttcctaggcgaaagctgctgaagaggtgtttctttggaggaggtttaagcggcacatagaagattcagcggacagcggacaaacatcctcccttttgaaggaattgcaaacatggtgcatttctgaagcagcctctgttcccacaggatgagctcagttacatgctttatttagctcactagtatttagctcagtagagtacctaccagctagctcgggaatcattgcttggtttatttgattgattgatagctgggctgtacatcccgtctaggagtttgctgctgggttggtcatttcttagagcaaagtcatgtagatagacagttgtagcatgaggttacctggctttgagctt

SEQ ID NO: 4016 - DNA, 682 bp, Triticum aestivum
gcaccggatcacggcgggcgcggacgtcctgctgatgccgtcgctgttcgagccgtgcgggctgaaccagctgtacgcgatggcgtacgggaccgtgcccgtggtgcacgccgtcggcgggctccggggacacggtggcgccgttcgacccgttcggcggcaccgggctggggtggacgttcgaccgcgcggacgccggcaggatgatcgacgcgctcgggcactgcctcaacacgtactggaactacaaggagagctggaggggcctccaggtccgcggcatgtcgcaggacctcagctgggaccacgccgccgagctctacgagaacgtcctcgtcaaggccaagtaccagtggtgatgcgctcgctgatgctgacgcctctcctgcaatgcatgcacgtacttacgggaccgccggaatcggggccgacgatcacgatcactggcgccccggagtagccaagggtcacgcgatgccaccggcggcagccggacgacggtggaggtagaggtagtgaaccgtgcccgtggcgccacccaacttttgggttcacgggttgtatacaccagttcagtcgggttcgtggcgtctgtggattaccgagtcgtaggcgatcaaataggaagttgcagagtctgtatactgccattttctcggctcttggtgtggaaaaacacagt

SEQ ID NO: 4017 - DNA, 658 bp, Triticum aestivum
gaggacaagatcctgcgcgaggtcgcgcggtgcgcgcgtcgggcgcggcgcagcgtcgactcccagcttggacgagctgcgcgagatgcactacctccacgcggccatcacggagtcgatgcggctgtacccgccggtgcccgccgacacgcacagctgcaaggaggacgacttcctcccggacggcacggttcgtcgggaaagggtggctgatgacgtactgcgcgttcgccatggcgcggctggagggcgtgtggggcaaggactgcgaggagttcaggccggagcggtggctcgacgaggagggcgcgttccgggcggagagcccgttcaagtacgcggtgttccacgcggggccgaggatgtgcctcggcaaggagatggcctacatacagatgaagtccatcgcggcgtgcgtgctggagaggttcagcctccggtacgccggcggcgaggggcatcccaggctcataatgtcacttacgctgcggatgggaggcggcctgccgatgcaggtgaagagcagaacagaggtggctagctaggatgcttggagtagtccatttcgtcacgaatcacaattgctcatactccattttctgttgtgttcttgcttggttcgggcaaaaaaatcgctagcgggtttaaaggtgttcat

SEQ ID NO: 4018 - DNA, 520 bp, Triticum aestivum
tcacggagtcgatgcgctgtacccgccgtgccgccgacacgcacaagctgcaaggaggacgacttcctcccggacggcacgttcgtcgggaaagggtggctgatgacgtactgcgcttcgccatggcgcggctggagggcgttggggcaaggactgcgaggagttcaggccggagcggtggctcgacgaggagggcgcgttccggccggagagcccgttcaagtacgcggtgttccacgcggggccgaggatgtgcctcggcaaggagatggcctacattcagatgaagtccatcgtggcgtgcgtgctggagaggttcagcctccggtacgccggcggcgaggggcatcccaggctcataatgtcactgacgctgcggatgggaggcggcctgccgatgcaggtcaagagcagaacaggggaggctaacgcctaggatgcttcatgcttggaggagtcacaaatcacattgctctgtactccatttctgtagtgttcttgcttggttcggccactaaat

SEQ ID NO: 4019 - DNA, 830 bp, Triticum aestivum
aacatcccagcgaagaaggatcgcccaaccatccacaacggcgcgagcacctcggcgaactccggcagagcgagatggggagccgatgtcacacttcttgtgtgcgacgagtcgtttgcgcacacagggcatactggcctcacggtctccggttttcaaggcccagttcttcggagacatgaaggagaagtgctcggcacgcgtggagatcaaggacatggaggcggcggtgttcagggccatgctgcacttcatctacactgacatggtgcctgagcttgatcggccgctcgaggaggtgaccacgatggctcaacatttgcttgtggccgctgacatgtatggacttgagaggctcaagctgatttgtgaaataaagctctgtggttgcatcactgtggacaccgcagcggccactcttgctttggcggagcagcacgattgctcgaagctcaaggccaaatgtgtcgagttcatcgtcagcacgcctgctgttcttgaggctgtgttggcgacagatgggtataagcaccttgaagaaagctgccctctggtcctgactgagcttctcaagtctgtccatgtgagtaagagttgaagggtagcatagtgctaggcctccaagaattgaaaatgcatagtctctgtttgtgcttgcatccatgtgtgctgtacgtagtaaaaacttatgtctgaatttacctaaaatggaaaacttatgcgcatctatatatgttatgttatgagcaacttaatgctttcattgctcctccaatttcgatgtaatttagtacaatgtcgtccaagatttggttgcatgcttgtcaata

SEQ ID NO: 4020 - DNA, 670 bp, Triticum aestivum
acgcgaccccacaagcccgcagcctcctccgcaacagaaccgtctgccgtgttcaccatcgacgggtacgaggacgttccggccaacgacgaagcggcgctgaagaaggcggtgccgtgcagccggtggctgtggccatcgaggctagcgggtcgcacttccagttctactcggagggggtgttcgcgggcaagtgcgggacggagctggaccatggcgtgacggcggtggggtacggcgccaccgtggacggcaccaagtactggatcgtgaagaactcgtgggggccggagtggggcgagaaggggtacatccgcatgaagcgcgatgtggaagacaaggaggggctctgcggcatcgccatggaggcatcctaccccgtcaagacctcagccaacccgaagcatgccggtgcccatgacgagctctgaagtctgaatctctcatcgattatctaactaattattggcccctaatatgcatgatcagggcattatcgcaagggaaaaataaataaacaatcaattgatatgtacccatcacatatattagttgcactatacttaattatcatacatgtactgcggtttcgaccgatttgtatctaaacggtttacattatatatcctgtcacttttttttgtgaaacctcactcatatttaataatta

SEQ ID NO: 4021 - DNA, 723 bp, Triticum aestivum
ggcggctcatggactacgccttccagtacatcgccaagcacggcggggtggccgcagaggacgcgtacccctacaaggcccggcaggcctcctcctgcaacaagaagccgtccgccgtggtcaccatcgacgggtacgaggacgtgccagccaacgacgaagcggcgctgaagaaggcggtggccgctcagccggtggccgtggccatcgaggctagcgggtcgcacttccagttctactcggagggggtgttcgcgggcaagtgcgggacggagctggaccatggcgtgacggcggtggggtacggcgccaccgtggacggcaccaagtactggatcgtgaagaactcgtgggggccggagtggggcgagaaagggtacatccgcatgaagcgcgatgtggaagacaaggaggggctctgcggcatcgccatggaggcgtcctaccccgtcaagacctcagccaacccaaagcattctggtgtccatgacgagctctgaagtctgaatctctcatcgattatctaactaattattggcccccaacatgcatgatcagggcattatcgcaagggaaaaacaaataaacaatcaatcgtatgtacccatcacatatattagttgcactacttaattgtcatacatgtactgcggtttcgaccgatttgtatctaaacggtttacattatatatcctgcctttttttttttgtgcaaccttaccc

SEQ ID NO: 4022 - DNA, 723 bp, Triticum aestivum
gattgtttgcaggcaaagctgcttgatcatgatggaaaatcgtttgtggttgcagggctagatggtgattacaaaaggaacaagtttggctcagtactggacatcattcccctggctaactcggtcaccaagctaacagcacggtgtgagctgtgcgatcgccgggcgtccttcacattgaggaagacacaggaaaccaggaccgaactcattggtggagccgatgtgtatatgcctgtgtgcaggcagcactacttggacgggcagattgtcatcgaggccacaaggattgttatggatattgaaagatccacggaagtagctcgctgctagttaggggtgtgtgtggcttatccagaatatccctctcttcagtgtgtcattcatccaacagcgtgttgagatgtgctaccagtgtgtacctgttattgatcatctgtggcagcatgccagcctgagtttcagattatgaggcgttgccatattaccataggagaacttaattaagttgcgatttgagcagattgtaaatatttaccagttgggaatgttggtgcaaatagctcttcttttagaatacccacctgttgcgacacaatgggttataatacagtttctggctgggaagggaatgcttagtaatatgcgtttgttggttacaaacattggttggcatgaaattgtttgtctctatgaggtagaatgagaaactgaagaggtaac

SEQ ID NO: 4023 - DNA, 1048 bp, Triticum aestivum
  N_region (97)..(120): n = any nucleotide
cccgctccaccgcctccgcccgctgctctcgctccctttccggccggatctttcccgccccaggcccttcgcccccccggccaggtcgctctctaannnnnnnnnnnnnnnnnnnnnnnncagggctcggatagacgaacgtgtttcggggatggaggtccaggcggcgaattccggcgagattcacatcatcgtcgggcccatgttcgctggcaagaccaccgcgcttctccgccgggtccaggccgaggccggcaccggcaggactgtggcactcataaagtctgacaaagacaatcgatatggattggattctgttgtgacccatgatggcacaaagatggcatgctgggctctaccagagctttcaactttccaagataaattagggagagatgcttatgataaggtagatgtcataggtatcgatgaagcccagttcttcgatgatcttcatgatttttgcagcaaagccgctgatcatgatggaaaaatcgttgtggttgcagggctagatggtgattacaaaaggaacaagtttggctcagtactggacatcattcccctggccaactcggtcaccaagctgacagcacggtgtgagttgtgcgatcgccgggcgtccttcacattgaggaagacacaggaaaccaggaccgaactcattggtggagccaatgtgtatatgcctgtgtgcaggcagcactacttggacgggcagattgtcatcgaggccacaaggattgttatggatatcgaaagatccacggaagtagctcgctgctagttaggggtgtgtgccttatccagaatatccctctcttcagtactccaacagcgtgttgagatgtgctaccagtgtgtacctgttattgatcatctgtggcagcatgccagcctgaatttcaagttatgaggcaatgccatattaccataggagaacttaattaagttgcaatttgagcagattgtaaatatttaccagttggggatgttggtgcaaacatctcttctttttagaatacccaccttttaattcgaaaatgat

SEQ ID NO: 4024 - DNA, 1076 bp, Triticum aestivum
gacaactccgcgtccggtttaccccttcttctcccccgcccgctttcaccagagcgactccagaccacgagccccgccgacgaagccgccatcgccagacgccgcccccgagcaagaggggagcgccccactcccgacattcaagccgatcggagcgcgatccggcaggtcggagcccagccatgtcgggggttttcggcagggtgttcgggaagtccaaggagcagagccaggcgtccgcgctggcctccatcgacaagctcagcgagactcttgaaatgttggaaaagaaggaaaatttactaatgaagaaggcgaatcttgaagttgagaaggcaaaggcgttcaccaaagccaagaacaaaaaagctgcactacagtgtctcaagaggaagagattatatgagcaacaggtggagcagcttgggaatttccaattgaggattcatgatcagatgataatgctggaaggtgcaaaagctacaacagagactgtggatgcattgagaaccggagcatcagcaatgaaagctatgcacaaatcaacaaatattgatgatgttgacaaaaccatggatgaaattaatgacaatatggagaacatgaggcagatccaggatctactgtctgcgcctatgggagcagcaagtgatttcgatgaagatgagctggaagctgaacttgcggatttggagggcgaggagttggaggcacagctactagcaccaaccacaagtgctcctatgactgctccagcgcgtgtacctcagcagtcgagtcggcccactgctcagagtagtaaaaccgaagatgatgagctggcagctttacaagcagagatggctatgtagttagtttgcaggacttgggcgtgggcatgtttagagaccagattgtgcaaatatatttgggaccacggtattttcatggaggtcttcctgggaagacgtcagaagtgcacacagaaactagttgcatctcaccctgatgatctcttatgtatatcttatcatgttacttctgtaatcaaacatctaagatgcgctgttgagcgcattatcagctaataaagggca

SEQ ID NO: 4025 - DNA, 640 bp, Triticum aestivum
aggccagcacgtgctcctggacgccgacatgaacggccggctgggggacttcgggctgcgcggctgtacgaccacggcgtggacccgcagacgacgcacgtggtgggcaccatggggtacctggcgccggagctggtgcgcacgggcaaggcgacgccggtgacggacgtattcgcgttcggcgtgttcgtgctggaggtgacctgcgggcgccgcccgctggggtgcatcgcgcccgacgaccagaacgtgctgctggactgggtgcaggagcacgagcgcaggcgcgcggggctcgacaccgtggacccgcggctgtgcggcaagtacgacgccgacgaggcgcggctggcgatcaagctggggctgatgtgcgcgcacccgctgccggacgcgcggcccgggatgcggcaggtgacgcagtacctggagggcgaggtggccatgccggaggtcgtcccgacgttcctcagctacaccacgctggcgctgatgcagaacgacgggttcgactcgttcgccatgtccttcccgtccacggtcaccacggacgccagccccacctccggcgacgtctcggccgtctccggcctctctggcggaaggtgaataaacaaggacaagaagtggtagtcgccgc

SEQ ID NO: 4026 - DNA, 666 bp, Triticum aestivum
gcaccatggggtaccgggcgccggagctggggcgcacgggcaaggcgacgccggtgacggacgtgttcgcgttcggcgtgttcgtgctggaggtgacctgcgggcggcgcccgctggggtgcatcgcggccgacgaccagaacgtgctgctggactgggtgcaggagcacgagcggcggcgcgcggggctggacacggtggacccgcggctgtgcggcaagtacgacgccgacgaggcgcggctggcgatcaagctggggctgatgtgcgcgcacccgctgccggacgcgcggcccgggatgcggcaggtgacgcagtacctggagggcgaggcgaccgtgccggaggtggtgccgacgttcctcagctacaccacgctggcgctgatgcagaacgacgggttcgactccttcgccatgtccttcccgtccacggtcaccacggacgccagccccacctccggcgacgtctcggccgtctccggcctctcgggcggacggtgaatgaataaacaaggacaagaagtcgtcgtacgtagtagtcgctgcgtgagtcgttggtttgattcctcatctatcgtgacgtacgtacgtcatctgctgtaacactgagcagtggcacttttcctagtagtggataattaactgtgagcagtaatacagtgat

SEQ ID NO: 4027 - DNA, 718 bp, Triticum aestivum
  N_region (704)..(704): n = any nucleotide
acgaggactgggacaagatcgtgatccaccgcgacatcaaggccagcaacgtgctcctggacgccgacatgaacggccggctgggggacttcgggctggcgcggctgtacgaccacggcgtggacccgcagacgacgcacgtggtgggcaccatggggtacctggcgccggagctggtgcgcacgggcaaggcgacgccggtgacggacgtgttcgccttcggcgtgttcgtgctggaggtgacatgcgggcggcgcccgctggggtgcatcgcccccgacgagcagaacgtgctgctggactgggtgcaggagcacgagcgccggcgcgcggggctcgacaccgtggacccgcggctgtgcggcaagtacgacgccgacgaggcgcggctggcgatcaagctggggctgatgtgcgcgcacccgctgccggacgcgcggcccgggatgcggcaggtgacgcagtacctggaaggcgaggtggccatgccggaggtggtgccgacgttcctcagctacaccaccctggcgctgatgcagaacgacgggttcgactcgttcgccatgtcattcccgtccacggtcaccacggacgccagccccacgtccggcgacgtctcggccgtctccggcctctcgggtggaaggtgaatgaataaacaaggacaagatttctcatgtatcgtggtgtacgtcatctggtgnaacatgcagtagca

SEQ ID NO: 4028 - DNA, 742 bp, Triticum aestivum
cgactcgggctgcgcggctgtacgaccacggcacggacccgcacacgacgcacgtggtgggcaccatggggtacctggcgccggagctggggcacacggggaaggcctccaaggcgtccgacgtgttcgcgctcggggccttcatgctggaggtggcgtgcgggcggaagccggtggtgcaggacgcgcgcgacaaccacctggtgctggtggactgggtgctcgaccagtggcgcgccgggacggtcaccggcgccgtcgacccacgcctgggcggcgacgtcgtggaggaggaggcgagcctggtgctgaggctgggactgctgtgctcgcacccgctgcccggcgcgcggccgaccacgcggcaggtggcgcagtacctggacggcgacctcaagctgccggagctgtcgcccacgtaccagagcttcaacatgctggcgctcatgcaggaccagggcttcgacccctacgtcatgtcctacccgatgacctccatcaccgccggcaccatgtcccagatgtctgacctctccggagggaggtgatccgcggtcgtcggcgtgtaactaggaatgctgtctgctagcgtcttcatattttgtgtatgttcagaaccgggtgagtttttcttcgtgtggtagtacatggatcgataacctgaatggaaagtgttgtgcaatcatgctcggcatggttttatgttcagatgagatattaccgaccaaaaaagtgagattta

SEQ ID NO: 4029 - DNA, 736 bp, Triticum aestivum
gcaaaagccagcagtatcatattcctaccaacgatccgatacagaattttctgagctcacaacccgaagcaatcaacaccagcaatgtcgatcgtgcggcggagcaacgtcttcgaccccttcgccgacctctgggcggaccccttcgacaccttccgctccatcgtcccggcgatctcaggtggcagcagcgagacggccgcgttcgccaatgctcgcatggactggaaggagacccccgaggcgcacgtcttcaagccgaccttccagcgtgaagaaggaggaggtcaaggtggaggtggaggacggcaacgtgctcgtcgtcagcggcgagcgcaccaaggaaaaggaggacaagaacgacaagtggcaccgcgtggagcgcagcagcggcaagttcgtcaggcggttccggctgccggaggacgccaaggtggaggaggtgaaggccgggctggagaacggtgtgctcaccgtcaccgtgcccaaggccgaggtcaagaagcccgaggtgaaggccatccagatctccggctgagtgaatgcgtctctgcgaatgatcatcagggttggagccagtttggttaatgtgtgcgagttctgcaacctgaaagtatgctatagttgtgtcttcgtcttgccgagtctgatgagacatctctgtagtgcgtttctttccccagccgtgtatgttcttgtgtaatcgccaacagatttggcgatgaataaatgaaaa

SEQ ID NO: 4030 - DNA, 809 bp, Triticum aestivum
gcaagcatccccaccgacccgagaccgcgtgcgctccacgcagcatccccgcagcaccgccccagagaagtccccccggagaaggaggaggatgtcgtggcagaacgtacgtcgacgaccacctgtgctgcgagatcgacggccagcacctcacctccgccgccatcctcggccacgacggcagcgtctggggcgcagtccccccaacttcccccagttcaagcccgaggagattgctggcatcattaaagactttgaggaacctggacatcttgcaccaactggtcttttccttggaggcacaaagtacatggtcatccaaggtgaacctggggttgtcatccgaggaaagaagggcaccggtggcatcactatcaagaagaccggcatggccctgattcttggtatctacgatgagcccatgactcctggccagtgcaatttggtcgtggagaggctcggcgactacctggtcgagcagggtttctaagcccgccctgatatgatgttattttggtcgtctgggactaagtttgctctactgtgggctttgcatccatctgcttggcgtaccgcatgatatatgcagtgaataattttagcttggggtttgtcggttggtgacgtgtcgaagggaaaaaaaggattttactatgttttctttttaatgtttggcatcgcgtcgtatcaaactcagccgctctttcgctgagtaatgtacatttgcctcgtcatggtaacttgtgggttctgctgctgctttattgaagatgattgcatttttactgacgtgcttgcctggtactacg

SEQ ID NO: 4031 - DNA, 614 bp, Triticum aestivum
ctcagcagcccccctcacatcccccccaagctcaacctccccacacgctccaaccaccagcacccatggcacccaaggcggcggagaagaagccggtggccacggccgagaaggcgacggcggggaagaagcccaaggcggagaagcgggcgccggcgtccaaggaggccggcggcgaggggaagacgaggggcaggaagaagggcagcaaggccaagaagggcgtggagacgtacaagatctacatcttcaaggtgctgaagcaggtgcacccggacgtcggcatctcctccaaggccatgtccatcatgaactccttcatcaacgacatcttcgagaagctcgccggcgagtccgccaagctggcccgctacaacaagaagcccaccatcacgtcccgggagatccagacctccgtccgcctcgtcctccccggggagctcgccaagcacgccgtctccgagggcaccaaggccgtcaccaagttcacctcatcctagacagcttaggcttgatcctcgtcgcttcatgccttctgtgtgtacctagtcggcagtatgatgttacaatctttgtaaggattctgctgcttgcttgcggccttgaaagaaata

SEQ ID NO: 4032 - DNA, 892 bp, Triticum aestivum
  N_region (144)..(144): n = any nucleotide
tgcttaagagtcaatgattcattacttacatgcccgcaaaaaaaaatgatccattacttacatgcccaaggcgtcagactcctaacacatcatcacacaggccgtgtggatacaaccgacaataatttacatatataggagcanctcacatacatacagagcctccccggcgagctgctcggagcgttcataagctcgcggcagccggcgcccggggctccagaaatgtctacagcatcagcaacccccctcacatcccaccgaaaccccatcttcccacacgctccaaccaccagcacccatggcacccaaggcggcggaaaagaagccggtggccacggccgagaagacgacggcggggaagaagcccaaggcggagaagcgggcgccggcgtccaaggaggccggcggcgaggggaagcagcggggcaggaagaagggcagcaaggccaagaagggcgtggagacgtacaagatctacatcttcaaggtgctcaagcaggtgcaccccgacgtgggcatctcctccaaggccatgtccatcatgaactccttcatcaacgacatcttcgagaagctcgccggcgagtccgccaagctggcgaggtacaacaagaagcccaccatcacgtcccgggagatccagacctccgtccgcctcgtcctccccggcgagctcgccaagcacgccgtctccgagggcaccaaggccgtcaccaagttcacctcatcctaggcttcatcgtcgtcgttttaacgaatcgatgatgatgttctgtatgtagttggcagtacgatgttacaatatttgtaaggattgtgctgcctgtgtgtttgaagaaatagtgatgttgctgtttgaatacagggagcaagttcgtttttgttatcc

SEQ ID NO: 4033 - DNA, 816 bp, Triticum aestivum
agtgagaaacgaaaacatctacatgctggctttttccttacggtgtcccctgaatctattcagcttgttgctgagcatgctgctgcaaataacaaggttttcttgatgaacctctccgctccctttatctgtgagtttttccgtgatgcccaagagaaggttcttccgtattctgactacatctttggaaatgaaaccgaggcaaggatcttctctaaagtccgagggtgggagactgagaatgtcgaggagatcgctttgaagatctcacaactgcctctggcttctggaaaacaaaagaggattgctgtgattactcagggtgctgatccagtagttgtggctgaggatgggaaggtaaaaacattccctgtgatcctattgcccaaggagaagcttgttgacaccaatggcgctggtgatgcgtttgttggcggcttcctctctcagttggttcaagggaagagcatcgaggactgcgtaaaggccggttgctacgcagcaaacgttatcatccagcaatctggctgcacttaccctgagaagcctgacttcaactaggccaaattcagcgattctacggaaagcaacacttaaccgcttgatggttcggcttgttctccctgtattattttgaggctttccatctgatccggcctaattttcggccgtggatatctgttgtactgctataatcggtacctttatctttggtataaggcatggttgccattatatggggtgttacttgtggccgtcttatccaagtatatgccgaagcgtggtcagaccgacgatactgcttgaaggcacgag

SEQ ID NO: 4034 - DNA, 698 bp, Triticum aestivum
gaatctattcagcttgttgctgagcatgctgctgcaagtaacaaggttttcttgatgaacctctccgctccctttatctgtgagtttttccgtgatgcccaagagaaggttcttccgtatgcggactacatctttggaaatgaaactgaggcaaggatcttctctaaagtccgtgggtgggagactgagaatgtcgaggagatcgctttgaagatctcacaactgcctctggcttctgggaaacaaaagaggattgctgtgattactcagggtgctgatccagtagttgtggctgaggatgggaaggtgaaaacattccctgtgatcctattgcccaaggagaagcttgttgacaccaatggcgctggtgatgcgtttgttggaggcttcctctctcagttggttcaagggaagagcatcgaggactgcgtaaaggccggttgctacgcagcaaacgttatcatccagcagtctggctgcacttaccctgagaagcccgacttcaactagaccaaattcggcgatggtacggaaagcaacacttaaccacttaatggttcggcttgttctccctgtattattttgaggctttctatctgatccggcctatattttaaggccgtggatgtctgttgtactgctataattggtaccttaatcttttggtataaggcatggttgccattatatggggtgtt

SEQ ID NO: 4035 - DNA, 1011 bp, Triticum aestivum
ctggctttccctacgggtccctgatctatcagctgttgctgagcatgctgctcccataacaggttttcttgatgaacctctccgctccctgttatctgcgagttttttccgtgatgcccaagagaaggttcttccgtatgcggactatatctttggaaatgaaactgaggcaaggatcttctctaaagtccgagggtgggagactgagaatgtcgaggagatcgctttgaagatctcacaactgcctctggcttctggaaaacaaaagaggattgctgtgattactcagggtgctgatccagtagttgtggccgaggatgggaaggtgaaaacattccctgtcatcctattgcccaaggagaagcttgttgacaccaatggcgctggtgatgcgtttgttggaggcttcctctctcagttggtgcaagggaagagcatcgaggactgcgtaaaggccggttgctacgcagcaaacgttatcatccagcagtctggctgcacttaccctgagaagcctgacttcaactagaccaaccaaattcggcgatggtacggaaagcaacacttaaccacttaatggttcggcttgttctccctgtattattttgaggctttccatctgatccggcctatattttaaggccgtggatatctgttgtactgctataattggtaccttttatctttggtataaggcatggttgccattatatggggtgttacttgtggccgtcttatccaagtatatgcggaagcgtggtcagaccacgatagtgcttgaatgcagtggaattctatggacgtgtttgttttgtgagaagtatggcagagcgtggctacaggctaatgtggctaatggcatgtctgtcagtgaaccaagggcattatttgcctgtcgtggctagaaatagtgcagtgcgaatgtaagtcgctccttgtgacaaactgcgtgttcagactcgagaccaagaagcccctgctgcctgctacaagtacaggttccaactatat

SEQ ID NO: 4036 - DNA, 706 bp, Triticum aestivum
  N_region (26)..(26): n = any nucleotide
tttgatgtcaagtagatgtagacganacatgatttccggttgaattggtggtgtgcaaacagacgtgacattacattttattcgaaggataatagcaaacatatacacatctggcatgggaagcatcaccatcattacagcaaaccatgagggctgagcatttactcgatgatagttctcaacctagccaggcttccgagggaaggtcacatccaaaagggagtgttttggcaccaatggctggtttggtcgttaaggttctgcttaaggatggggtacacgtggaagatggtcagcctgtcatggttatagaagcaatgaagatggagcacgttgtgaaggcgcctcgggcaggttatatagaagggctgaaggctaccgctggacaacaagtttttgactccagtgtccttttcactgtcaaggataagagcacaaactgatgaaccaagaaattggagccacgcatcagaattcaagtggcgactccgcctttcagaaagaagaataagcaaaaaagcagctggagatcattctgtgactaaataatactaggtgatctccctagttagctggagatcatatcttccggtacccatttcctgtatagcgtgtacattagtgtcagtggcattgtgcaatgtaacaaatcatgtgagtatgtaacgcaatttgtctgccttgctttgtcccacgtgaaccttct

SEQ ID NO: 4037 - DNA, 1066 bp, Triticum aestivum
tccaaaattaattacactaggtagcattatcacgcatcgatgccgttacgtacgtgagccttgatcgctatacggccgccggcgacgtggaccgacttgatttggttccaagttacaagcgggacggcatgacgccgaatttgtcggcctcggtgacgacgtggttgcgggtgatgtcggccagcgagttgcagccgttcagcgccatggtcagctcgaactcgtcgcgcagcatcttgagcacgttgctcaccccggcctccccggccaccgccagcgagaacaccaccggccttccgatgaagacgccggcggcgccgagagcgagcgccttgaagaacgtcggtgccgcggcgcacaccgccgtccaggaagacggggatctgcccgccagcacccttcacgacctcttccagggcgctgatggtcgccgggacgtgtccagttgccgggcgccgtggttggacacgatgattccggccgcgccgttctcgacggcgtagcctgctgtcctctgcggtgatcactcctttcaccaggatcggcatcgtggtgatggactgcagccacctcacaaagacaagtcaacctcaccgaggagaagcagagagaagggagaagatgtcggggcgcggcaagggaggcaaggggctcggcaagggcggcgccaagcgccatcggaaggtgctccgggacaacatccagggcatcaccaagccggcgattcgacgtctggcacgtcggggcggcgtgaagcgcatctcggggctcatctacgaggagacccgcggcgtgctcaagatcttcctcgagaacgtcatccgcgacgccgtcacctacaccgagcacgcccgccgcaagactgtcactgccatggacgtcgtctacgcactcaagcgccagggacgcaccctctatggattcggaggctaggctccggcgaggcgaatccagctcgcacctgctgatcagatattcagattagcagtagctaggcgttgttcagtgttcatggtgatcgatgtaatttatgatgtatggtgcctgttcgttggaatggataaat

SEQ ID NO: 4038 - DNA, 377 bp, Triticum aestivum
  N_region (111)..(111): n = any nucleotide
  N_region (255)..(255): n = any nucleotide
  N_region (281)..(281): n = any nucleotide
  N_region (358)..(358): n = any nucleotide
  N_region (360)..(360): n = any nucleotide
  N_region (365)..(365): n = any nucleotide
  N_region (374)..(374): n = any nucleotide
ggttgaagatggatgggaagcagcagcattggccctcaaagggccatgaccaatcacctcagcgtgtgcttgagcttccactcgagcatgctcagccatggccatacgcancttagcttcagcacctcgcggcctgctttctccctagattctatctctgctcttagttccatcgaagcctgcttctcctcctgtaacaaagcttgctctagcatgagtcgctcctccgatcgaaactcaccaatggcccttttnttggtcattatgttgtatgccaacanttgcttctcaaaagttgttgtgaactcagcaatttttaccagaatgttatgatcccattgctgaagacgagagggantntggcnagttgcgtngct

SEQ ID NO: 4039 - DNA, 852 bp, Triticum aestivum
caggacccttgatagccacgcaactggccagattccctctcgtcttcagcaatgggatcataacattctggtaaaaattgctgagttcacaacaacttttgagaagcaagtgttggcatacaacataatgaccaagaaaagggccattggtgagtttcgatcggaggagcgactcatgctagagcaagctttgttacaggaggagaagcaggcttcgatggaactaagagcagagatagaatctagggagaaagcaggccgcgaggctgctgaagctaagatgcgtatggccatggctgagcatgctcgagtggaagctcaagcacaccctgaggtaattggtcatggccctttgagggccaatgctgctgcttcccaaggcgatgatggtcctagtcatgacatggcacaagaacaggttgaagatggatgggaaaacactcaaagggatgatgatgatccatccgaggatttcctcaatgatgagaatgaaccagagaatggaaactctgatatgcaagaggagtggcggcgatcgggggaatttgatctaaactctaggtaagactgcaaggggtacggcgtcggtggtggcaatctgatctgaactctaggcaagataggtgcacccgacttgagaaaaggcttgaggatgcatcggctggtgcctggtaacttgtctctagttatctgattatatatgttttgaagataacttgtcctgtcattgtggctgtaaacacgcaattcaaaactagtactatttagcttttctttttgagaaaactagtactccctccgcaaactaatataagagcactactcatgtgtttaaacagtgtttagaatgtt

SEQ ID NO: 4040 - DNA, 737 bp, Triticum aestivum
tgaaggtttctttccttgctgttagggcatcacaaggaaaatggcaagcagagcaggtggcgatggcaaagaacccataaatgagcaagtagttgcaaatacctatgccacatgcgcactgaaatgaaccagctctacaccaagatcacggagctggaaatggaagtcagtgagcacgcccttgtgattggcgcaatagagccctggaccccacaaggcgttgctacaggatgattggcggagtcttggttgagaggaccatcagggaagtcttgcccgccgtgcaccgcaacaaggagggccttgaagaggtcgtcgctcgcatgaaggaggctctggagaggaagaagcaagagatcaccgagtttgagctcaagtacaagatcaggatcaggaagggcgacaacagcgccaacgaagaaggcagcatgaaggaagcctctgcccagggtgttcttgttggccttgcgggccagtagagcagaatggcagggcaaggagacttgcacagttctttatcgaagccagattgcttgttaccggatgccaacctgacagtgattgtgtgtttctgggtgcagtttatcatgctacacctatgcagtactgttgaatcctcgcgtgtaaaactagagattatggtagatcaggactctgttcgtaaactgcagattttgcgctggttgtgtcatgactcgcgtgtcttttgtctcccttatgttgttgcgctttaacac

SEQ ID NO: 4041 - DNA, 824 bp, Triticum aestivum
agatctcccatcggcggcggcgcgcgcgaaggtttctttctttgctgttagcgcatcacaaggaaaatggcaagcagagcaggtggcgatggcagagaacccataaatgagcaagtagtcgcaaatacttatgccaacatgcgcactgaaatgaaccaactctacaccaagatcacggagctggaaatggaagtcagtgagcacgcccttgtgattggcgcaatagagcccctggaccccacaaggcgttgctacaggatgattggcggggtcttggttgagaggaccatcagggaagtcttgcccgccgtgcaccgcaacaaggagggccttgaagaggtcgtcgcccgcatgaaggaggctctggagaggaagaagcaagagatcaccgagtttgagctcaagtacaagatcaggatcaggaagggcgacaacagcgccaatgaagaaggcagcatgaaggaagcctctgcccagggtgttcttgttggccctgcgggccagtagagcagaatgacagggcaaggagacttgcatggttccttatcgacgccagattgcttgttaccggatgcccgcctgacagtgattgtgtgtttctggatgcagtttatcatgcagtactgttgaatcctcgcgtgtaaaactagagattatggtagaccgggactctgttcgtaaactgcagattttgcactggttgtgtcatgactcgcgtgccttttgtctcccttcttgttgttgcgcttcagaatatttctgtctgttgatgacatgttttgattcaagatgagtttcaaagaaattttaccgcattgaaatgt

SEQ ID NO: 4042 - DNA, 717 bp, Triticum aestivum
gtgcgccgccaagacccataatgaccattagtcaaacacttatgccacatgcgcactgaaatgaaccaggctctacaccaagatcacggagctggaaatggaagtcagtgagcactccctggtgattggcgcaatagagcccctggaccccacaaggcgttgttacaggatgattggtggagtcttggttgagaggaccatcagggaagtcttgcccgccgtgcaccgcaacaaggagggccttgaagaggtcgtcgcccgcatgaaggaagctctggagaggaaaaagcaagagatcaccgagtttgagctcaagtacaagatcaggatcaggaagggcgacaacagcgccaatgaagaaggcagcatgaaggaagcctctgcccagggtgttcttgttggccctgcaggccagtagagcagaatggcaggacacaaggagacttgcatagttctttatcgaagccagattgcttgttaccggatgccaacctgacagtgattgagtgattgtgtgtttctggatgcagtttatcatgctacacttatgcagtactgttgaatcctcgcgtgtaaaactagagattatggtagatcagaactctgttcgtaagctgcagattttgcactggttgtgtcgtgactcgcgtgtcttttgtctcccttctgttgttgcgcttcagatcttttctgtctgttgatgacatgtttcgattc

SEQ ID NO: 4043 - DNA, 583 bp, Triticum aestivum
acgagcagccccacacgattgcggcggacctggtcttcatcatcgacgagaagccgcacccggtgtacacccgggacggcaacgacctggtggcgacgcagaagatcccccttgccgaagccctgacggggtacacggtgcacctgacgacgctggacgggcgcagcctgacggtgcccatcagctcggtgatccacccggggtacgaggaggtggtgcgcggcgagggcatgccgatccccaaggacccgtccaggaagggcaacctgcgggtcaagttcgacatcaagttccccgccaggctcaccgccgaccagaagtccggcgtcaagaggctcctggggcagtagggcgtgcccagggagccttgtctgtctgtgtgttgttgaactgaacaggggatgtgagatgagatattgcctgcttttggagcatcggcgatcaccgagttggccctgtggactagatgatgagaaaatgtatacaatgtgaacttgaggtgcatagataggtaaatcttggatcaagtgcatttcttgtaagcttttggagatcgaagttcgtccgctggatgacttaattt

SEQ ID NO: 4044 - DNA, 742 bp, Triticum aestivum
  N_region (22)..(22): n = any nucleotide
tgaagaaggcaccaaaatcacnttcccggaaagggcaatgagcagccccacacgatcgcggcggacctggtcttcatcatcgacgagaagccgcacccggtgtacacccgggacggcaacgacctggtgcgacgcagaagataccgctggcagaggcctgacggggtacacggtgcacctgacgacgctggacgggccgcagcctgacggtgcccatcagctcggtgatccacccggggtatgaggaggtggtgcgcggcgagggcatgccgatccccaaggacccgtccaggaagggcaacctgcgggtcaagttcgacatcaagttccccgccaggctcaccgccgaccagaagtccggcgtcaagaggctcctggggcagtagagcaggtctgtgtgtgttgttgaactgaatgcaggggatgtgagatgctgcctgcttttggagcatcggcgatgatcgagttggccctgtggattagatgagaaaagtgtatacgacgatgtgaacttgaagtgcatagataggtaaatcttggaagtgcatttcttgtaagcttttggtgatcgaatgtggtctgctggacgagctattttttgttgtacctggcttctgtttggattagttatgcggtagaggtaataaaatggtttcatggttgtccaaaaaactgcgtgtacatttgtacgctaccggctgatgttattacattgcttgtaaaaccttgcagactggaattc

SEQ ID NO: 4045 - DNA, 536 bp, Triticum aestivum
atcctcaccatcaccaaccagttccaggcgctggtgggcatctcgctgatggagatcctgtccaagcactcctcggacgaggtgtacctggggcagcacgagacgccggcgtggacgtcggacgccaaggcgcaggaggcgttcaggcggttcggggcgaggctggagggcatcgagaagcaggtggtggccatgaacggcgacccgcggctcaagaaccgcaccgggccggccaagttcccctacatgctgctctaccccaacacctccgaccacaccggccaggccgaggggctcacggccaggggcatccccaacagcatctccatctgaggacctctatctctgcttgcttgcttgcaccggatactagctactagctatatgcttgccatgatctcagtaataaggcaataatgcgtgtgtgcacgacgggtccgatcggcatgcggaagctcagctggctactgcctaccggttaatgcatcgtcgtgtacagaaaaattcccttcttttttgtccaataatgaagtcga

SEQ ID NO: 4046 - DNA, 714 bp, Triticum aestivum
gcagacggtggcggagctgatcaaggcctgcgccaccatcatctggaccgggtcggcgctccacgcggccgtcaacttcgggcagtacccctactcggggtaccaccccaacaagccgtcggcgagccggcggccgatgccggcgccgggcagcgaggagtacgccctgctggagcgcgacccggagaaggcctttatcctcaccatcaccaaccagttccaggcgctggtgggcatctcgctgatggagatcctgtccaagcactcctccgacgaggtgtacctggggcagcacgacacgccggcgtggacgtcggacgccaaggcgcaggaggcgttcaggcggttcggggcgaggctggagggcatcgagaagcaggtggtggccatgaacggggacccgcggctcaagaaccgcaccgggccggccaagttcccctacatgctgctctaccccaacacctccgaccacacgggccaggccgaggggctcacggccaggggcatccccaacagcatctccatctgaggagctccatccctgcttgcttgcttgcttgcaccggatactagctagtgtgggtgttctgctggtgcatatgctttgccatgaccacaataataaggcaataatgcgtgtgtgcacgacgggtccgatcggcatgcggtgcgtcgtcgtgtacagaaaaattcccttcatttgcccaataataa

SEQ ID NO: 4047 - DNA, 782 bp, Triticum aestivum
tcatctgacggggtcggcgctgcacgcggccgtcaaccttcgggcagtacccctactcgggggtaccaccccaacaagccgtcggcgagccggcggccgatgccgtcgccgggcagcgaggagtacgccctgctggagcgcgccccggagaaggcattcatcctcaccatcaccaaccagttccaggcgctggtgggcatctcgctgatggagatcctgtccaagcactcctccgacgaggtgtacctggggcagcacgacacgccggcgtggacgtcggacgccaaggcgcaggaggcgttcaggcggttcggggcgaggctggagggcatcgagaagcaggtggtggccatgaacggggacccgcggctcaagaaccgcaccgggccggccaagttcccctacatgctgctctaccccaacacctccgaccacacgggccaggccgaggggctcacggccaggggcatccccaacagcatctccatctgaggacctccatctctgcttgcttgcttgcttgcaccggatactagctactagctactgtgggtgttctgccggtgcatatgcttgccatgatctcaataataataaggcaataatgcgtgcgtgcacgacgggtccgatcggcatgcggtgcgtgtgcgtcgtcgtgtagagaaaaattcccttcatttgcccaataataaagtcgatgttgtgatgttccctctgcttgggcgttgtaagctcctctgtttgctctgttttcggatcaagttcaagttgctcaatagcat

SEQ ID NO: 4048 - DNA, 833 bp, Triticum aestivum
cgcacgcgcgcgcgcccgtcagcgccccatcgagagaactgcgtgctccctcgagagctctacaagggaccaccaagaagatgaagatctccagggagatcgccgatgccagcgggaagacgattccggtggaggagattctgacgatcgacgtgaagccggggtggaagaagggcacgaagatcaccttcccggagaagggcaacgagcagccccacacgattgcggcggacctcgtcttcatcatcgacgagaagccgcacgcggtgtacacccgggacggcaacgacctggtggcgacgcagaagataccgctggcggaagccctgacaggctacacggtgcacctgacgacgctggatgggcgcagcctgacggtgcccatcagctcggtgatccacccggggtacgaggaggtggtgcgcggcgagggcatgccgcttcccaaggacccatccaggaagggcaacctgcgggtcaagttcgacatcaagttccccgccaggctcaccgccgaccagaagtccggcgtcaagaggctcctggggcagtagagcaggtctgtgtgtgttgttgaactgaacgcagggggatgtgagatgctgcctgcttttggagcatcggcgatgaccgagttggccctgtggattagatgagaaagtgtatacgatgtggacttggaagtgcatagataggtaaatcttggaagtgcatttcttgtaagcttttggagatcgaagttcgtctgctggatggcttattttttgttgttcctggcgtttgtatggattagtgatgcggtagaggccaataaagtggtttcatagatcccc

SEQ ID NO: 4049 - DNA, 833 bp, Triticum aestivum
cggacgcgtggttgtccacacacatttccttgtagttttggtgtgtaccacgagcaccccgtctcatctcatcccatccaagctagacaagtcccgcactgtgctgtggtgctccatctagccagcttttttgctcagcttagcttccaaatctgctccacagctccggcggcacaagaagaaaatatccgtgcgtccgcgagaggaagggagatcgtccatggagaaggacaaccacaaggagggggagggggcgacggcgtggatgacggtgccggcgttcggggactgggacatgaagaacggcgccatgccggactactccatggacttctccaagatccgggagatgcgcaagcagaacaagaaggagctctcccgcgccagcctcggcggcgacgacgacctcctcgcccaccacaagcatcagcaccagcagcaccagcccgccgccaaggctccccagcccaccaagctcggcgctccggccaaagaccacggcccgctccacggccgcgaccactcgcccacgggaaggaagaggttcctgagctatttccagtgctgcatcaaggcctgaagaccagctgctgccactgccctccgtcgaggtgtcgcagcatgaagcagcttagcaaatttagcctaggcttctttggtgtttggtcaagcttgcaactcaatgtgtaatataattccacgtcctgacgctgcctgtttagagaacgggacggtttatgtggggaacagattgcttgtgaatgtcaaggttactatcttgcctagtagtaataatattcactgtgagaaatggcatctgatatgataatttt

SEQ ID NO: 4050 - DNA, 566 bp, Triticum aestivum
cacgcgttcctggcgaccaagctgccgccggagcaccgcatctacgacccggacaaggagacggtcgactccggcatgtcgacgttcctcacggcgttccccaggggcttcgccatcgaggtgctggacgtgtacagcggcccgccgagggtcgccttcaagttccggcactggggttacatggaggggccgttcaaggggcaccctcctcacggccagcgcgtcgagttctttggggtctgcgtcttccatgttgatgaggagatgaaggtggagaaggcggagtacttctacgagcgcggcaacttcctcgcaagcttcttgagcgcgcctgctatctgctgctgctgcatcggcttcaggttgtcctgtgatgagaggaaactgaagcaccaaagaaacatgtcgctcatatcgttggatgaccagcttcagatttcaaattggcttttgatttcatgtggtggcattacaatgtttgaataaagtggcttattatgtctggtacaaacaccacttcgggtgtgtaggtgtaagaagcccaacttggatttggacatcgctat

SEQ ID NO: 4051 - DNA, 1028 bp, Triticum aestivum
cacacctagaccacaagcatcaaaggcaagcaagcagtagtaaccacaaatcaaacatgaagaccttcctcatctttgtcctccttgccatggcgatgaacatcgccactgctgctaggcagctaaaccctagcaacaaagagctacaatcacctcaacaatcattttcccatcaacaacaaccatttccacagcaaccatatccacaacaaccatatccatcacagcaaccatatccatcgcaacaaccatttcccacaccccaaccacaatttccccagcaatcacaacaaccatttacccagccccaacaaccgacccccctacaaccacaacaaccattcccccagcaaccccaacaaccacaacaaccttttccacagccgcaacaaccatttccctgacaccacagcatccgcaagcccctcacatcccacaccaagccccacgctcgaaccaccacaccaccagcacccatggcacccaaggcagcggagaagaagccggtggccacggccgagaagaccaccgcggggaagaagcccaaggcggagaagcgggcgccggcgaccaaggaggccggcggcgaggggaagacgaggggcaggaagaagggcagcaaggccaagaagggcgtggagacgtacaagatctacatcttcaaggtgctcaaacaggtgcacccggacatcggcatctcctccaaggccatgtccatcatgaactccttcatcaacgacatcttcgagaagctcgccggcgagtccgccaagctggcccgctacaacaagaagcccaccatcacgtcccgggagatccagacctccgtccgcctcgtcctccccggcgagctcgccaagcacgccgtctccgagggcaccaaggccgtcaccaagttcacctcatcctaggctggcttcgttgttgtttcatgagttgatggcggcaggcgtcgtgtacgtagtcggcagtagtacgatgttacaatctctgtaagaattgtgctgcttgtgtttctgaagatatag

SEQ ID NO: 4052 - DNA, 647 bp, Triticum aestivum
gcattagtgcagtgcgagatgcatttgagaagtctcttggctttcgactgcaaaagatgaatcctaataccgattaccattgtttgaaaacatttggatcttacttcagggaagacattcgaatacctgcaggtacaaagatcgacttccgtcaaacatgtgatggccagcttataactgaagttgatggcaaacaaattggtgctgtccagagcaaagatctttgcagggctttcttcgatatgtatatcggtgacccgcctgtttcagtggagaccaaacaagacatcgctcagaatgtgggtggactcattagaagatgctagggtaatggctaactaaatagccggcggttggaattatttgattcttctattaggggggaaagagcatatatatagatacgggaaaccaggagaagatcggttgtatgtatagtagtgatagatctgtaacttgtaaactatagactggcagaacttgtaacttgcagaggcttagcatcttctcctgggcaaatgcctccatgattttcatatgggttggcattttgctgtttcctggattgtatcatgtacactgatccagttagaagtgtagcagagagcgcgtgtttcctgcatcatcaatatcaaaatcatggcttc

SEQ ID NO: 4053 - DNA, 543 bp, Triticum aestivum
atcttctaagggaaaatattcatatgacagtcagactggtagttagctacaatgggcttagcattagtgcagtgcgagatgcatttgagaagtctcttggctttcgactgcaaaagggaagacattcgaatacctgcaggtacaaagatcgacttccgtcaaacatgtgatggccagcttataactgaagttgatggcaaacaaattggtgctgtccagagcaaagatctttgcagggctttcttcgatatgtatatcggtgacccgcctgtttcagtggagaccaaacaagacatcgctcagaatgtgggtggactcattagaagatgctagggtaatggctaactaaatagccggcggttggaattatttgattcttctattaggggggaaagagcatatatatagatacgggaaaccaggagaagatcggttgtatgtatagtagtgatagatctgtaacttgtaaactatagactggcagaacttgtaacttgcagaggcttagcatcttctcctgggcaaatgcctccatgattttca

SEQ ID NO: 4054 - DNA, 574 bp, Triticum aestivum
gaaatctcttggctttcgactgcaaaagatgaatcctaatactgatgaccattgcctgaagacatttggttcttacttcagggaagacattcgaatacctgtgggtacaaagatcgacttccgtcaaacatgtgatggccagcttataactgaagttgatggcaaacaaattggtgctgtccagagcaaagatctttgcagggctttcttcgatatgtatattggtgacccacctgtttcagtggagaccaaacaagacatcgcccagaatgtgggtgggctcattagaagatgctagggtaagagctagacggtctgtaattatttcattcttctatacgggggaaagggcatatagagacgggaaacctaggagaagatcagttgtatgtatagtagtgatagatctgtaacttgtaaactatagactggcagaacttgtaacttgacagaggcttagcatcttctcctgggcaaatgcctccatgattttcatgattggttggcatttgctgtttccttgccattgtatcatgtacactgatcccgttagaagcgtagcagagagcgcgtg

SEQ ID NO: 4055 - DNA, 984 bp, Triticum aestivum
  N_region (288)..(288): n = any nucleotide
cgcgatgacatcgaggatgtgcagcggagtccagatcatgcaccacctcacgggtcaccgcaacatctcgagctcccggcgcctacgaggaccgccactcggtcaacctcatcatggagctatgtgagggcggggagctattcgaccgcatcatcgcgcgggggcactactccgagcgagccgccgccctgctctgccgcgagatggtctccgtcgtgcatagctgccactccatgggggttttccaccgggatctcaagcccgagaactttttgtttctcaacacanaggaggactcgccgctcaaggccactgactttggcctctccgtcttcttcaaacacggggagcagtttaaggatctcgttggaagtgcgtattatgttgctcctgaggttctgaagcggcactatggagcagaagctgacatatggagtgcggggattattctgtacatccttctgtctggtgttcctcctttttgggcagacaatgaggatggcatatttgaggctgtcttgcttggtcacatacttaaaacatttgaatattttgataaggaccacagcggatacataacacaatgcacatgaatagattggagaaggaagaccacatacttaaaacaattaaagatattatcgctgaagttgatacagatcatgatggaagaatcaactaccaggagttcgttgccatgatgagaaacaacagcccggagattgttccaaatcggcggcgcatgttctaattatcttctaccgtaacatcttcctggccccattatcgtccaagaataattttgagggatgtgccgctttgatgttattgtccctcatctttagatttggcgtgtatttccttgatcacatgatcggttccattgctgctccgagggtattatgatcatatgcgtactcctcctgatcatttatatggaaacaggcgttgtgtaacagttttttaatgattatgttaagcagc

SEQ ID NO: 4056 - DNA, 588 bp, Triticum aestivum
gagatactaccactcaagccgtgaccgagatactgaccactcaagccgtcaccgtgatactggccgttcaagccatgaccgagagcgtgatcattcaagccgtcaccgagagcgagatcgttcaagccatgacagagagcgtgattatgaccgtcacagcagggattgtgactattacaggtccaggcattcagaagaaagaagggattaccgaagcaagcgtgacaatagtagacacagacgctccagctcatgtcataggagcataagccggagtcgtagcaggagcaggagcaggagccggagtcggggcaggaatgaacatcgatccagtccatttggggatacaagcaaagaaaaggctgctgctgcctcgagcaacctagctaagctgaaagacctgtacggtgacgtaactgagaagaaggatgacgctgatgccatgcggcttcaccatgattcatgtgccgaggaggttattaggctgggaggccctaggtggagataaatttgaaccgccgaactgtcattaaggttatgttactccactgttcgatctaccggcttctgcattgacattagtgagag

SEQ ID NO: 4057 - DNA, 679 bp, Triticum aestivum
tgaaaggtggaggagccagaagaatcagtgccggagcttcctgcaactgcaagtagcgagcctgctgtggtaactgaggaagtagcagcctcggatgagaaaaccacagaggtttctgctgctggagctgcagaagcaagcacaaccacagcaactatttctcctgctcttgtcaagcagttgcgtgacgcaactggagcaggcatgatggactgcaaaaaggctcttgctgaatcgagtggtgacattgataaagctcaagaattcctccggaagaaagggctggctgctgctgacaagagggctggaagagccactgcagagggaagaattggttcttacatacatgacagcagaatcggtatccttattgaattgaactgtgagactgactttgtatcacgaggtgatgtctttaaggagttggtcgatgatcttgccatgcaagctgctgcttgccctcaagtaaattacatttccattgacgatgtccctgaggaggttgtgaagaaggagacagagttggagatgcagagggaggacttgctgtcgaagcctgagcagatccgcgctaagattgtcgagggccgagtaaagaagaggcttggagaatttgcattgcttgaacaaccattcatcaagaatgacaaggtcacaacgggtgaatgggtgaagcaaa

SEQ ID NO: 4058 - DNA, 691 bp, Triticum aestivum
gccttcgacgtggcaacccggacgggtactggaaggcgccctacgcgctcatctaccgcacatggccatcctcggcgtggagggcttctcggcgctgccgcagcactgcctgcagctctgcgcggcgttctttgccttcgccgtgctggctaacctggcgagggacttcctgccgcgcggctcgggaggttcgttccgctgcccatggccatggccgtgccgttcctcgtcggcgccagcttcgccatcgacatgtgcgtggggagcctcgtggtgttcctctggcactggctcgacgggaagaaggctgcgctgctcattccggccgtcgcctcgggcctcatctgcggcgacgggatatggattttcccgtcgtcgctgctcgcgctggccaagatcaagccgccgatgtgcatgaagttcacgcccggaagctagagagaggatccatacaacgtcagattacataggcggtctgcatatagaagaagcaaataaccagagcattccattttggggtggccattacggtacatagagtgatgccgggtaaatccggcgacttgttcatatgagtctagactctagggagtcgtgtatactgtacatcagcagagatgtcaaattttcagagcgacgagaactattgcttgttgtcgcctacagactacaaagaatatcggcgccttat

SEQ ID NO: 4059 - DNA, 729 bp, Triticum aestivum
ctctttacgagccttcgacgtggccaacccggacgggtactggaaggcgccctacgcgctcatctaccgcaacatgccatcctcggcgtggagggcttctcggcgctgccgcagcactgcctgcagctctgcgcggcgttcttcgccttcgccgtgctggccaacctggcgagggacttcctgccggggcggttcgggaggttcgtgccgctgcccatggccatggccgtgccgttcctcgtcggcgccagcttcgccatcgacatgtgcgtggggagcctcgtggtgttcctctggcacaagctcgacgggaagaaggccgcgctgctcattccggccgtcgcctccggcctcatctgcggcgacgggatatggatattcccgtcgtcgctgctcgcgctggccaagatcaagccgccgatgtgcatgaagttcacgcccggaagctagaggatcgatccacacagcgtcagattacataggcggtctgcatatagaagcaaataaccagagcattttggggttatcataccattacgttacatagagtgatgccgggtaaatccggcgacttgttcataagagtctagactctagggggtcgtgtatactgtacatcagcagagatgtcgaattttcagagcgacgagaacaattgcttgttgtcgcctacagactacaaagaatatggtgtcttatcttcgtttcttagagatccataacagatcc

SEQ ID NO: 4060 - DNA, 720 bp, Triticum aestivum
caaatgttgaccctcaaaagaggaaaccggtgtcagaggttgtgaaagtcacaaggcgtgaaaatgttgatgaaaggcctgtacgcctaagtaagaaagtatcaaaaccatcaacatccaagaagacttctcagccaaaggctgaaagtccactcgacagttttctgaaatcactaggacttgagaagtattctattaccttccaggcggaggaggttgacatggcggccctacgtcacatgactgaaagtgatctcaaggcgttgggcatcccgatgggtcctaggaagaagattacccttgccttggaatccagagcgtagggcaagtccctggagtacaatgtagaaaagcagggagatgtggtaggtttttgctcatctacaagtttggcatatcttggaaagcagtggtacaggtacaacaatgcggtgtctcttgtaatggcatgttgctgtaagattattagactgctgttgtttatctggtctgcatgctttcctggccagaccagctgattaactgatgaggtatccgtgctgttgaagctgcggtgatgttcttgctgtatactattattacgccttttttttcattggaaactggcactattagagtcatagagttgagattctccaattagtatttcaagtgttgcgttgctcagtgtaaaggttttaaatttcatctgttttcttgctcagcccttgttcggaatgt

SEQ ID NO: 4061 - DNA, 805 bp, Triticum aestivum
atcacaagttcacaacacccaaccatggcgccttcactcttcatccttgccctcctcctcaccgtcgctgcaaccgacgcggccaccatcacggtggtgaacaagtgctcctatacggtgtggccagccgccatcccggtgggaggtgggaccaagctcgaaccaggccagttgtccacaatccacccgcccgccggcacaaattctggcaggatctgggcgcgtacgggctgcaaatttgacgccagcggcaaggggtcctgtaccacgggagactgcggcggcctgctggcctgccgtgccggcgggaagccacccgcctcgctcgccgagtacactctggggacaggcagcaatgctgacttctacgacatctccctcgttgacggattcaacgtgccgatgagcttcgggcccgccggtggcagctgccgcgcggtcagctgcgccgcggacatcaacgcaaagtgcccgtcggagctgaaggtggacgggggctgcatgagtgcctgcggcaagttcggcaccccacagtactgctgcccggcgccaagtacgccggcgacctgtgggccgacgagctactcgcgtttcttcaaggggatctgcccagacacctacagctacgcctacgacgacaagagcagcacattcacctgcgccgccggaacaaactacaaagtcacattctgcccgtagatccgtcatcgtcatgcatattcatgcatgctaggaactgaatttggtttgatgaataaatatgtactggaactagaattagaatgaatgaatcgaggtagtttcc

SEQ ID NO: 4062 - DNA, 768 bp, Triticum aestivum
agggggagacgatcgggtgcagttcgagaactgctggtgtcccccaaggtggacctcgtcctcgccggccacgtccactcgtacgagcgcaccgccgcttctccaacgtcgcctacaacatcgtcaacggcaaggccacgcccgtgcgcgacttggacgcgcccgtctacgtcaccatcggcgacggcggcaacatcgagggcatcgccaacaacttcacggagccgcagccgtcctactcggccttcagggaggcgagcttcgggcacgcgacgctggagatcaagaaccggacgcacgcctactacgcgtggcaccgcaaccacgacggcgccaaggccacagccgactccgtctggctcaccaacagacaccacctccccaccgacgactccaagtgaagtggccggacggatcatctgcccctttacttgagcaacgtggggtttttcttacatgtcgatccatccggctgcgatgggacagaaaagaagacatcttgggcagctgcaaatggttgctacacggctgcttctttcatctcatttgtgaatctcttgagctcgagccgtagttagtgcaattagtcatgtaaccttaagggtaaagctcttgcgcgtagtctcgtttgaaataaaataacaaaagagatttgggaggttcttctcaagcacctgatctgcattcgactatatacacgtgttgactgaaactgtgcatgataatcagatcatgtgcagagagcatcatttcttctcaatataatat

SEQ ID NO: 4063 - DNA, 767 bp, Triticum aestivum
tggctcatccttgctcatgcactcgccatggtacaacagcaacaacttccactacatggagggggagacgatgcgggtgccagttcgagagctggctcgtcgccgccaaggtcgacctcgtcctcgccggccacgtccactcctacgagcgcagccgccgcttctccaacgtcgcctacaacatcgtcaacggcaaggccacgcccgtgcgcgacatggacgcgcccgtctacgtcaccatcggcgacggcggcaacatcgagggcatcgccaacaacttcacggagccgcagccgtcctactcggcgttcagggaggcgagcttcgggcacgccacgctggagatcaagaaccggacgcacgcctactacgcgtggcaccggaaccacgacggcgccaaggccacagccgactccgtctggctcaccaacagacaccacctccccaccgacgactccaagtgatcggacggatcgtctcatctccgaagcaatgtcgtgggaggggacccgttttactgcccctttacttgagcaatgttgatcgttgtggctgcgatgggggtttgttgcttagttttgggacagaaaagaagagatcttgggcagctgcaaaatggttgctacgggacacatgactgcctttttcatctcatgttttggatgtcgtcgtcacaaatgtcttgagctcgagctgtagttagtgcaattagtcatgtaaccttaagggtaaagctcctgcgcgtagtctcgtttgaaataaaataa

SEQ ID NO: 4064 - DNA, 617 bp, Triticum aestivum
tcctacctcccagcgaaacaccaccacacccgtccccggcgaaggagcagcggcatccatggcccccaaggcggagaagaagccggtggcggagaaggccgagaagaccacggcggcgaagaagaccaaggccgagaagaggccgccggcgtccaaggagggcggcgctgacaagaaggggaagaagaagtccaagaagagcgtggagacgtacaagatctacatcttcaaggtgctgaagcaggtgcacccggacatcggcatctcctccaaggccatgtccatcatgaactccttcatcaacgacatcttcgagaagctcgccggcgagtccgccaagctcgcccgctacagcaagaagcccaccatcacgtcccgggaggtgcagacctccgtccgcctcgtcctccctggtgagctcgccaagcacgccgtctccgagggcaccaaggccgtcaccaagttcacctccgcatagatgggctgctccctgccatgttggatgatgatgctgtttgtactctgtcatcttgtaagttaactgtttcatgaactgaagaaatagtaacagtgctgatttattctgtctctgaatctgactgtctatcatgttcggt

SEQ ID NO: 4065 - DNA, 494 bp, Triticum aestivum
caccgcacatctccccggcgaagcagcagcaaccagcggcatccatggcccccagggcggagaagaagccggtggcggagaaggccgagaagacgacggcggcgaagaagaccaaggccgagaaccgcccgccggcgtccaaggagggcggcgagaagaaggggaagaagaagtcgaagaagagcgtggagacgtacaagatctacatcttcaaggtgctgaagcaggtgcaccccgacatcggcatctcctccaaggccatgtccatcatgaactccttcatcaacgacatcttcgagaagctcgccggcgagtccgccaagctcgcccgctacaacaagaagcccaccatcacctcccgggagatccagacctccgtccgcctcgtcctccccggcgagctcgccaagcacgccgtctccgagggcaccaaggccgtcaccaagttcacctccgcttagatagtctgttcctgtcttctttgtcgatcgatg

SEQ ID NO: 4066 - DNA, 990 bp, Triticum aestivum
aaattccccaatctcctcccgcactcaacccaatccccacctacccgcaccccatggcgccgaaggcggagaagaagccggcggcgaagaagcccgtggaggaggagcccgcggcggagaaggccgagaaggcgcccgccgggaagaagcccaaggccgagaagcgtcttcccgcggcgggcaagacctccgccaaggacggcgacaagaaggccaagaagaagagcaagaagagcgtggagacgtacaagatctacatcttcaaggtgctcaagcaggtgcaccccgacatcggcatctcctccaaggccatgtccatcatgaactccttcatcaacgacatcttcgagaagctcgccggcgaggccgccaaactcgcgcgctacaacaagaagcccaccatcacctcccgcgagatccagacctccgtccgcctcgtcctccccggggagctcgccaagcacgccgtctccgagggcaccaaagccgtcaccaagttcacctcctcctaggttcgcccgccccccctcatggtgaccgctgttgatcccctgctggatctgcctgcctatctagatatatatagtagtattagtagtgcttgatggaaatcgttggacggatgatggttcgtgtgtagtcgtcggtggttgtaagatgatgttcccgtggtgctacttttgcgtagtcgatctgaatattaatggaacaaaaatctgctactctgagtttctgatgaattgtttcaagagtagttatatttgacatcctgtttgtgctattcttgattagtttgagatggttatatgattttgatccgacctgttgtgcaccgtgggtgttagtttacatcgttctgttgttcctggtcatagattgaatcaagttagacccaattggggtgtgaatcaagttagacccaattggggtgtgaatcaagttagacccaattggggtgttacaattggttgatctgaatgttaatgaaat

SEQ ID NO: 4067 - DNA, 922 bp, Triticum aestivum
ctttattcaggaacatttattcatcatttccatattgcaactagtacttgccacacatgatgatgcatgacatttttattttgccaccgctacattgatcaactagtacgcaccaccaccaccatcaatcacaacacccaaccatggcgtcttcactcttcatccttgccctcctcctcaccgtcgctgcaaccgacgcggccaccatcacggtggtgaacaagtgctcctacacggtgtggccagccgccatcccggtgggaggcgggaccaagctcgaaccgggccagttgtccacaatccatccacccgccggcacaaaatctggaaggatctgggcgcgtacgggctgcaaattcgacgccagcggcaaggggtcctgtaccacgggagactgcggcggcgtgctggcctgtcgtgccggcgggaagccacccgcctcgctcgccgagtacactctggggacaggcagcaatgctgacttctacgacatctccctcgttgacggattcaacgtgccgatgagcttcgggcccgtcggcggcagctgccgcgcggtcagctgcgccgcggacatcaacgcaaagtgcccgtcggagctgaaggtggacgggggctgcatgagtgcctgcggcaagttcggcaccgcacagtactgctgcccaccgccgagtacaccgtcgacttgcgggccgacaaactactcgcgtttcttcaaggggctctgcccagacgcctacagctatgcctacgacgacaagaccagcaccttcacctgcgctagcggaacaaactaccaactgaccttctgcccgtagatccgtcatcatcatccatatgcatatgcatgctaggaactgaatttcttcgatgaataagtctgtacttgacggaactagaaatagaacgaatgaatgaagga

SEQ ID NO: 4068 - DNA, 1074 bp, Triticum aestivum
tccgactcggcggaccccgtcaccaccatccacatgtgggtccccgccaggccgccacgcaaccccctggtcctcctccacggcttcggcgcctccgccacgtggcagtggtacccctacctccgccccctcatcgccgccggcttcgaccccatcgtccccgacctcgtcttcttcggcaactcctccacccgcctccccgatcgctccgacacattccaggcgtggtcgatcaagacggcgctggaggcgatcggggtgaccaagtttgggctggttggggtgagttatggagggttcgtggggtacaggatggcggcgatgtacccggtacgcggtggagagggtgactctggtgtgcgccggcgtttgcctggaggagaaggacctcgcggagggtctgttcccggtggccgcggtcgatgaggcggcagcgctgctggtgccacggcggccggaggaggtgcggcgcctggtcaggctcacattcgtgcgaccgccgatcatcatgccgtcgtgcttcctttgggactacattaaggtgatgggctcagaccatatccaggagaagactgagctactacacgctttgattagtgggaggcaaatttcgactcttccaaaactacgtcagaagacgctgataatttggggggagcaagataaggtgttcccgatggaattggctcacagattgaagagcatgtgaacaaattggcaggcatctggatgggaactctcggttggcagtcatacacaacgctgggcacgcagtcaatctcgagaagcctgcagaggtgtgcaagagcatcatcgagtttttccaagagccgatccccgaagcttcaaacgacgaaagggtgtagtaggcgtggctctcatcgaagcggcggatggtgtcttcttcgctgggcatcggcattgcggtcaaaactgacactggaagaggggaggaagaggggggatcgcagcgttttcacccttctcggtggaaaaatacctgatgtatgttgccttgagcagtgtaatcatcggttatgtgaactggcatgcctgccagagcacgttgtgcta

SEQ ID NO: 4069 - DNA, 880 bp, Triticum aestivum
tccaccacccgctcccccgatcgctccgacacattccaggcgcggtcgatcaaaaaccggcgctggaagccatcgggggtgaccaagtttgggctggtttggggtgagctatggagggttcgtggggtacaggatggcagcgatgtgacccggacgccgtggagagggtgactctggtgtgcgccggcgtttgcctggaggagaaggacctcgcggagggtctcttcccggtggccggggtcgacgaagcggcagcgctgctggtgccacggcggccagaggaggtgcggcgcctggtcaggctcacattcgtgcgaccgccgatcatcatgccgtcgtgcttcctttgggactacattaaggtgatgggctcagaccatatcgaggagaagactgagctactacacgctttgattagtgggaggcaaatttcgactcttccaaaactacgtcagaagacgctgatagtttggggggagcaagataaggtgttcccgatggagttggctcacagattgaagaggcatcttgatgggaactctcggttggcagtcatacacaacgctgggcacgcagtcaatctcgagaagcctacagatgtgtgcaagagcatcatcgagtttttccaagagccaatccccgaagcttcaaacgacgaaagggtgtagtaggtgtggctctcatcgaagcggcggatggtgtcttcttcgctgggcatcggcattgcggtcaaaattgacactggaagaggaaaggaagaggggggatcgcagcgttctcgccattctcggtggaaaaatacctgagttatgttgccttgagcagtgtaatcatcggttatgtgaactggcatgcctgccagatcacgttctgctaccgt

SEQ ID NO: 4070 - DNA, 748 bp, Triticum aestivum
caaacccaaagaggaggaagaacaccaaggactcactaccagcgcctctccgcgatccaaatcctcccgggaaagatcttggttgatctcttcctcctcgaccgcctcccaggttcttggtgcagcttttgccagtctcagcaggagatttcatgtctgatcttgacgttcagatcccaactgcctttgacccctttgccgaggcgaatgctggggacgctggtgcagctgccggatcaaaagactacgttcatgtacgcatccagcagcgtaatggtcgcaagagcctgaccactgtccagggtctgaagaaggagttcagctacagcaagatcctcaaagacctcaagaaagagttttgctgcaatggtacagttgtccaggacacagaacttggacaggtcattcaactccagggtgatcagaggaagaacgtctcaaacttccttgtccaggccggcattgtgaagaaggaacacatcaagattcatggtttctgagcaactgccagctccatatcagagtctacatgcaaagcagctatatattggtggtgcagtatatttagttgtgtgctagcgctagcaggcgttaccagcttgcgcgctctgagtatacagaaaatctagcatagcccacctctctgcgtgtatgcttgttaccgttgtgttgaaactttgtaaggagcaccgtctttagatggcttgttaccctctcccatcaaggttgaataatatatgctttgtta

SEQ ID NO: 4071 - DNA, 938 bp, Triticum aestivum
agaaacccagagtcgtccgcctcctcccgtctgtaaattccgctccttccctcgtctctctataggaggcatccaacccaaagaggaggaagaacaccaaggactcacttaccagcgcctctccgcgatccaattcctcccgggaaagttcttggttgatctcttcctcctcgaccgcctcccaggttcttggtgtagcttttgccactctcaccaggagatttcatgtctgatcttgacgttcagatcccaactgcctttgacccctttgccgaggcgaatgctggggacgctggtgcagctgccggatcaaaagactacgttcatgtacgcatccagcagcgtaatggtcgcaagagcctgaccactgtccagggtctgaagaaggagttcagctacagcaagatcctcaaagacctcaagaaagagttttgctgcaatggtacagttgtccaggacacagaacttggacaggtcattcaactccagggtgatcagaggaagaacgtctcaaacttccttgtccaggccggcattgtgaagaaggaacacatcaagattcatggtttctgagcaactgccagctccatatcagagtctacatgcaaagcagctatatattggtggtgcggtatatttagttgtgtgctagcgctagcaggcgtcaccagcttgcgcgctccgagtatacagaaaatctagcatagcccacctctctgcgtgtatgcttgttaccgttgtgttgaaactttgtaaggagcaccatcgttagatggcttgttaccctctcccatcaaggttggataataatatatgctttctgaagcgtggtatccttcgtatcatccattttggtttgacattcgccatcccagccggtgtcgatacatctagtcttgaactgtatctgcatctgcttgatgactgcattatgctgc

SEQ ID NO: 4072 - DNA, 720 bp, Triticum aestivum
cgacgcgtggcaaggactgactgccagcgcctctccgcgatccaaatcctcccgggaaagttcttggttgatctcttcctcctcgaccgcctcccaggttcttggtgtagcttttgccactctcaccaggagatttcatgtctgatcttgacgttcagatcccaactgcctttgacccctttgccgaggcgaatgctggggacgctggtgcagctgccggatcaaaagactacgttcatgtacgcatccagcagcgtaatggtcgcaagagcctgaccactgtccagggcctgaagaaggagttcagctacagcaagatcctcaaagacctcaagaaagagttttgctgcaatggtacagttgtccaggacacagaacttggacaggtcattcaactccagggtgatcagaggaagaacgtctcaaacttccttgtccaggccggcattgtgaagaaggaacacatcaagattcatggtttctgaacaactgccagctccatatcagagtctacatgcaaagcagctatatattggtggtgcagtatatttagttgtgtgctagcgcaagcaggcgttaccagcttgcgcgctctgagtatacggaaaatctagcatagcccacctctctgcgtgtatgcttgttacccttgtgttgaaactttgtaaggagcaccatcgttagatggcttgttaccctctcccatcaaggttgaataat

SEQ ID NO: 4073 - DNA, 624 bp, Triticum aestivum
gggtctccatgtcccgcgtggactacgcgccgtggggcgtgaacccgccgcacacccacccgcgagccaccgagatcgtctacgtgctcgagggctccctcgatgtcggcttcgtcaccaccgccggcaagctcttcgcccgcaccgtctgcaagggcgaactcttcgtcttcccccgtggcctcgtccactaccagaagaacaacggaggtgcgccggccgccgccatctcggccttcaacagccagcttccgggcacgcagcccctcgccctagcgatgttcgcagcctcaccaccggttcctaccgacgtgctggccagggcgctccagatcgacggcggcctggtggaggccatcaagtccaagttcccgcaaaagtaaccagcatgcatgcatgttggttgggtcagctctacgtgcgtatgtgctgccaataatgacgaaggaccacgtaaaagtgcagttttaataaatttgcttgacaatgtatcttttgtcggtgcatgtttagtgaagggcctcgtcggttttactgttaattgttgctttttcttcacgaacctactggttattaaattgtatgtgtccattattggtaaatgcagtgcccgactgcttgaat

SEQ ID NO: 4074 - DNA, 610 bp, Triticum aestivum
  N_region (4)..(4): n = any nucleotide
  N_region (63)..(63): n = any nucleotide
  N_region (72)..(72): n = any nucleotide
  N_region (473)..(474): n = any nucleotide
  N_region (557)..(557): n = any nucleotide
  N_region (606)..(607): n = any nucleotide
tcgnttccgcgttgacggccggcgaacgtggagaactcccggggcttcaacacgctgggcgtnttccatgtnacgcgtggactacgcgccgtggggcgtgaacccgccgcacacccacccacgcgccaccgagatcatctacgtgctggagggctccctcgacgtcggcttcgtcaccaccgccggcaagctcttcgcccgcaccgtctgcaagggcgagctcttcgtcttcccccgtggcctcgtccactaccagaagaacaacggaggcgccccggccgccgccatctcggccttcaacagccagcttccgggcacgcagtccctcgccctagcgatgttcgcagcctcgccaccggtgcccacggacgtgctggccagggcgctccagatcgacggcggcctggtggaggccatcaaggccaagttcccgccaaagtaaccagcatgcacgcatgttggttgggtcaagnnctacgtgcgtacgtgctgctaataatgacgaaggaccgcgtaaaagtgcagttttaattcatttgcttgacaatatcttgtgncggtgcatgttttgtgaagggcctcgtcggttttactgttaattgttgnnttt

SEQ ID NO: 4075 - DNA, 559 bp, Triticum aestivum
gacggcggcgaacgtggagaagctcccggggctcaacacgctgggcgtctccatgtcccgcgtggactacgctccgtggggagtgaacccgccgcacacccacccacgtgccaccgagatcatctacgtgctagagggctccctcgacgtcggcttcgtcaccaccgccggcaaactcttcgcccgcaccgtctgcaagggtgagcttttcgtcttcccccgcggcctcgtccactaccagaagaacaacggcggcgcgccggccgccgcaatctcggccttcaacagtcagcttcccggcacgcagtccctcggcctagcgttgttcgcagcctcaccgccggtgcccaccgacgtgctggccagggcgctccaggtcgacggcggcctggtggaggccatcaggtccagattcctgccaaagtaaccagcatgcatgcatgcatgcatgttggttgggtcagctgtacgtgcatacgtgctgctaataataaaggaccacgtaaaagtgcagttttaattcattcgcttgataatatgttttgtagtactatattct

SEQ ID NO: 4076 - DNA, 585 bp, Triticum aestivum
  N_region (12)..(13): n = any nucleotide
  N_region (53)..(53): n = any nucleotide
tcgcgcgtgganntacgcacccgtggggcgtgaacccgccggaacacccaccnacgggcgaccgagatcatctacgtgctggagggctccctcgacgtcggcttcgtcaccaccaccggcaagctcttcgcccgtaccgtctgcaagggcgagctattcgctttcccccgcggcctcgtccactaccagaagaacaacggaggcgcgccggccgccgccatctcggccttcaacagccagcttccgggcacgcagtccctcgccctagcgatgttcgcagcctcaccaccggttcctaccgacgtgctggccagggcgctccagatcgacggcggcctggtggaggccatcaagtccaagttcccgccaaagtaaacagcatgcatgcatgtctacgtgcttacgtgctcctaataaacacgaaggaccacgtaaaagtgcagttttaattcatttgcttgacaatatcttgtgtcggtgcatgtttagtgaagggcctcgtcggttttactgttaattgttgctttttcttcacgaacctactggttattaatttgtatgtgtccattattggtgaatgaatga

SEQ ID NO: 4077 - DNA, 813 bp, Triticum aestivum
catcaggaatctgaaggagaaggcatcgttcaagaacccagatgagttctatttcaagatgatcaacagtaaaaccgtggatggaatccataggcccaagcctgaagcaaataataagtacaccgaagaggaacgtatgctcttgaagcataaagacatgggatacatctttcaggccattcaaagtgaaagaaagaaagttgaacgattgagctcaacccttcacgcagtggatgacaagcgttcaaacaagcacatttactttgcggaagacagagaagaagccaaagaaatacgatctaggataggtgaaagcagcagcgcacctcaatttggtaacatcccttctcgtataaagaggaaaacagcttcctcctacaaggagttagaaagcaggaaagaaagggttaagaatcttgagaaattgtatgcggacatggccttgcaaaaagaactgaagaaacctggacgcaaaaggaagctccgtgaagaagagattttaaattcaacatcacagcctgtttacaagtggcgtgcgcaaaggaagcgatgataggaatggcgaaagctggacaattgggaacagacaagctggtgcttgaagagtttcacttccctgtgacattgcccttgcccttacacaaccccatccattgctttcagatacctttataacctttgcctggtgatatttgtggatcctatgccggagaccatgtactgctattagtctattaccatatgttaatttctcgaaatgttaagtgatcagagtcaccatgtaggaacaattttgatggatatagttgaaat

SEQ ID NO: 4078 - DNA, 714 bp, Triticum aestivum
agaggaacgttatggctgttgaagcataaagacatgggatacatctttcaggctgttcaagtgaaagaaagaaagttgaacggttgagctcaacccttcactcagtggatgacaagcgttcaaacaagcacatttactttgcggaagacagagaagaagccaaagaaatacgatctaggataggtcaaagcagcagtacacctcaatttggcaacatcccttctcgtataaagaggaaaacagcttcctcctacaaggagttggaaagcaggaaagaaagggttaagaatcttgagaaattgtatgcggacatggccttgcaaaaggaactgaagaaacctggacgcaaaaggaagctccgtgaagaagaaattgtaaattcagcatcacagactgtttacaagtggcgtgcgcaaaggaagcgatgataggaatgacgaaagctggacatttgggaacagacaagctggcgcttgaagagattctcttccctgtgacatcgcccttgcccttccacaaccccccatccattactttcagatacctttataacctttgcctggtgctatttgtggatcctatgccggagaatgtactgctattagtctattaccttatgtcaatttctcgaaatgttaagtgatcacagtcaccatgtaagaacaattctgatgggtatagttgaaaatcatgcctgtgttgttatcaagatat

SEQ ID NO: 4079 - DNA, 1059 bp, Triticum aestivum
ttctctttccggcctcccctctcccttctcctcgccgcgtagcccctcccaaatccgctcatccgccggtccgctcgttcttccgggagaggggcagcgaggacgaagatgtcgtccctgcggaactcgattccgcggcgggctcacaaggagcgcgcccagccggagtcgcggaagaagtacgggcttctggagaagcacaaggaccatatcctccgcgccagggcctaccagcgcaaggaggatttcatcaggaatctgaaggagaaggcatcattcaagaacccagatgagttctatttcaagatgattaacagtaaaaccgtggatggaatccataggcccaagcctgaagcaaataataagtacaccgaagaggaacgtatgctgttgaagcataaagacatgggatacatctttcaggccgttcaaagtgaaagaaagaaagttgaacgattgagctcaacccttcacgcagtggatgacaagcgttcaaacaagcacatttactttgcggaagacagagaagaagccaaagaaatacgatctaggataggtcaaagcagcagcacacctcaatttggcaacatcccttctcgtataaagaggaaaacagcttcatcctacaaggagttagaaagcaggaaagaaagggttaagaatcttgagaaattgtatgcggacatggccttgcaaaaagaactgaagaaacctggacgcaaaaggaagctccgtgaagaagagattgtaaattcagcatcacagactgtttacaagtggcgtgcgcaaaggaagcgatgataggaatggcgaaacctggacaattgggaacagacaagctggcgcttgaagagttttacttccctgtgacattgcccttgcccttccacaaccccatccattacttccagatacctttataacctttgcctggtgatatttgtggatcctatgccggagaccatgtactgctattagtgtattaccataatttctcgaaatgttaagtgatcagagtcaccatgtaggaacaattttgatggatatagttgaaattat

SEQ ID NO: 4080 - DNA, 686 bp, Triticum aestivum
gccggggtcccccgccggcggcgctgctggcgcgtacgagctcggcggaccctcggcggaagcagctttcggcaaggtgaagcacgcgcggcaccgggcacgggggaccacttcgccgtgaagatcctggaccgcggcagggtgctctccctccggggcgccgacgaccagtgcgcagggagatcgccacgctcaccatgctcgcgcaccccaacgtcgtccgcctccacgaggttgctgctagcaaacaaagatctacatggtgcttgagtttgtcaatggaggcgaactgtttgacaggattgcaatgaagagaaaactatccgaacgagaaggaagaagactttttcagcagctaattgatggtgtgagctattgccatggaaagggtgtctaccacagagacctcaagcctgaaaacgttcttattgaccgaaaaggcaacatcaagatctctgattttggtctctgtgctttacctcaacacctcgggaaggatggattgctgcatacaacctgtggtagccccaactatgttgcacctgaggttctgaaaaacagaggttatgatggatcactgtcagatatctggtcctgtggagtaattctttacataatgctcgtaggacaacttccatttgatgacagaaatatggttgttctttatcagaagattttcaagggcg

SEQ ID NO: 4081 - DNA, 687 bp, Triticum aestivum
tcgagccctggatgacgggcaactgccgcggcccctccaccgccttctgcctcctctacaagctcttcaccatgaagctcaccgtcaaccagatgcacggcctgctcaagcacccggactccccctacatcagagctattgggtttctgtacctgcgctatgccgcggacccaaagaccttatggacctggtatgagccctacattcaagatgacgaggagttttcccctggatccaatggtaaaatgacaactatgggcgtttatgtgcgtgatgtcatccttggtcaggttactgcccatctggagaaaatgaagctcccaacaaagcagtcagggataactggggattctagccgccttggttcagatgatactgcccggcggcctccttcagtgaaggcttctctgtccgtctcttttggtcagcgtgctccacaccgtgcatccacaagggattcatccccagtccgaaagacattgccttctgtacgagaaagggaaaggagtcatgatggcagtcatgccagatctccacccaggaagcaccgaactcagagtcgtgaacgcaggcgtgaccttgaaaggaccgtcagatcgcaccgggaacgaccagataggagctggtcggccagccggatacgaaacggatacgcggcaagcaaccaaaggcattaaagccgccaaa

SEQ ID NO: 4082 - DNA, 576 bp, Triticum aestivum
aagatcaagacgtaccacgaggtcagtcgacgagatctacaaccaggtggaccacgtcgagccctggatgacgggcaactgccgcggcccctccaccgccttctgcctcctctacaagctcttcaccatgaagctcaccgtcaaccagatgcacggcctgctcaagcacccggactccccctacatcagagctgtaaattgggtttctgtacctgcgctatgccgcggacccaaagaccttatggacctggtatgagccctacattcaagatgacgaggagttttcccctggatccaatggtaaaatgactactatgggcgtttatgtgcgtgatgtcatccttggtcagtactacttcgacagtcttcttccacgagtgcctctcctaattctgcgacaggttactgcccatcttgagaaaatgaagctcccaacaaagcagtcagggataaccggggattctagccgccttggttcagatgatactgcccggcggcctccttcagtgaaggcttctctgtccgtctcttttggtcagcgtgctccacaccgtgcatcacaagggatcatccccg

SEQ ID NO: 4083 - DNA, 1236 bp, Triticum aestivum
agaaaattctgatctcatcattattgacacaagtggacgccataagcaagaggctgcactcttcgaagaaatgcgtcaagttgcagaagcaacgaaaccagacctggtgatatttgtgatggatggcagtattggtcaggctgcgtttgatcaggcacaagcatttaaacaaagtgcttctgttggtgctgtcatcgtaacgaaattggatggtcatgcaaaaggaggcggtgcacttagcgcggttgcagctacaaaaagtccagtgatatttattggaactggagaacacattgatgaatttgagatttttgatgtgaaaccatttgtcagccgtctgctaggtatgggagacttgtctggcttaatggacaagatccaggatgttatgcctgctgatcaacagcctgagcttctggcaaagctggctgaaggaaccttcactctcagacttttgtatgagcaattccagaatcttctgaaaatgggtcctattggccaggtcttctccatgttgcctggatttagttcagagttgatgccaaaaggacatgagaaagaaggccaagcgaagattaagcggtacatgacgattatggattccatgacagcagcagagctcgacagtacaaacccaaagctgatgactgagtcgcgaatcatccggatcgctcgggggtctggcaggcaaatcagagacgtgatggacatgctggaagagtacaagcggctagccaagatgtggagcaagatgaaggggctaaagatgccgaagaatgggaagatgagcgacctgtcccagaacctgaacatccagcagatgaccaaggcgctcccgccgcaagtgctgaagcagatgggcggcatgggcggcctgcaggccctgatgaagcagatgggcggcaaggacatgagcaaaatgctcggtggcatgggactgggcggtgattagcctggcaaatgtaggtagagtttattctgggcataggtggtgtgattgctgcgttgtcagagtttgctatatttatatagatctcaaaagatttcccatcctgacaaatatagtcctcaactcttgaaaaaatcatttgaaatttctctggaactaacatctagtaaggtcatcaaatttacaggtagtgtagcttctgtgaatttgttgcgtcgtcgcgttcctcgcttggtatacttgttttatgaatcatgcggtcttctggatctggagagcctgaaacc

SEQ ID NO: 4084 - DNA, 830 bp, Triticum aestivum
agattttagttgcagagaaatttcacataactttttgaggagttgggaagtatctttgtcaggatggaaatctttagagatctatataaatatagcaaactccacagcgcacaagcacaccacctatgccacaagaaactacctatatttgccagatctcatcaccaaccaccaatccattccccaccagcaccttccggcgaaacacagcacctctccccggcgaacagcagcgtccaatggcccccaaggcggagaagaagccggctgccgcggagaagaccccggcggccgagaagaccacggccgggaagaagcccaaggccgagaagcggcccccgaagtccaaggagggcggcgctgacaagaagaagaagaagggccaagaagagcgtggagacgtacaagatctacatcttcaaggtgctgaagcaggtgcacccggacatcggcatctcctccaaggccatgtccatcatgaactccttcatcaacgacatcttcgagaagctcgccggcgagtccgccaagctcgcccgctacaacaagaagccaaccatcacgtccagggagatccagacctccgtacgcctcgtcctccccggcgagctcgccaagcacgcagtgtccgagggcaccaaggccgtcaccaagttcacctcctcctagaccacgatggttctctgtaacagtcacctgtttagaccatgtcgtcttgtaacttgcgttggttctgtgggaacacactgtttcattacctcatgaaatggtaatggtgcttctttgatctgtgtcatggttatgtatcatgttcagttcttgtcccccga

SEQ ID NO: 4085 - DNA, 482 bp, Triticum aestivum
  N_region (416)..(416): n = any nucleotide
gcgaagattaagcgatacatgacgattatggactccatgacagctgcagagctcgacagcacaaacccgaagctgatgaccgagtcgcgaatcatccgtatcgctcgagggtctggcaggcaaatcagagacgtgatggacatgctggaagagtacaagcgactagccaagatgtggagcaagatgaaggggctaaagatgccgaagaatggaaagatgagcgatctgtcccagaacctgaacatccagcagatgaccaaggccctcccgccgcaagtgctgaagcagatgggcggcatgggtggcctgcaggctctgatgaagcagatgggttgcaaggaaatggaccaaaatgttggggggcaatgggaattggtggtgaattaaatctggcaaatataggtagtttcttgtgnataggtggtgtgcttgctgcgctgtggagtttgctatatttatatagatcatctaaaggtttccat

SEQ ID NO: 4086 - DNA, 1020 bp, Triticum aestivum
cttagagaaagaaccaactctggttcggggccaagggcataggcccaaactgcttgccaatcataagctttctcagaattagctccttccacattatcagctagatccatcttatgcaggttgtgcaatgccctattcagaacagaagcaagaagctgcagtcctagtacacgctgcccaggaaccatgctcctggtaagtgccaacgcctcattgattgtgtaaccaacagctgcaggatctccctctgttcgtaggaagtcacgctcagctacactttctccatgggtcttcttgccatctggttgctcctgagaagattgaaatcccagaatatctccatctaatgcaaacctacacgacctgatccgctccactctctcactccatgccttccaagagtgtgcactctgctcaccagcagtcaaatgctcgcctggaatagcctttgcagtcttccttggccctgaagtttgcctactcttatccttaccctcatctttcttgccaccaggcagagctcgacagcacaaacccgaagctgatgaccgagtcgcgaatcatccgtatcgctcgagggtctggcaggcaaatcagagacgtgatggacatgctggaagagtacaagcgactagccaagatgtggagcaagatgaaggggctaaagatgccgaagaatggaaagatgagcgatctgtcccagaacctgaacatccagcagatgaccaaggccctcccgccgcaagtgctgaagcagatgggcggcatgggtggcctgcaggctctgatgaagcagatgggtggcaaggacatgagcaaaatgctcgggggcatgggactgggtggtgattaaatctggcaaatataggtagtttcttgtggcataggtggtgtgcttgctgcgctgtggagtttgctatatttatatagatctctaaagatttccatcctgacaaagatacttcccaactcctcaaaaagttatgtgaaatttctctgcaactaacatctgctaggtca

SEQ ID NO: 4087 - DNA, 483 bp, Triticum aestivum
ccgcggtgctgcctcccgagttcctcgaggccaccaagggcaggtgcctcctagcgagctggtgcgagcaggaggcggtgatgcaccacgaggcggtgggcgccttcctgacgcactgtgggtggaactcgatgatggaggggctcagcgccggggtgcccatgctatgttggcctttcttcgccgagcagcagaccaactgccgatacgcgtgcatggagtggggcgtcggggtggaggtcggcgacgacgtccgccgggaggcggtcgaggcgaggataagggaggtgatgggaggagaagtagggagggagatgaggaggagggcggcagagtggaaggaggtcgcttctcgctcaaccgcgcaacctggtggcaggtcgttggccaaccttgagagtctgctcaaggatgtactgaagtgaccgccaataacaaataattaaggtgggtatatagtcactccttgcaaaactatagtgg

SEQ ID NO: 4088 - DNA, 425 bp, Triticum aestivum
tgtcgagccttccctatgtggatgccatcgtcaaagagaccatgcggttgcacccggtagcgccgatgcttgtaccccgcctttcacgcgaggacacgtctatcaacggctacgacatccccgccggcacacgggtgctagtcatggtctggtctattggccgtgacccggagttgtgggaagcgccggaggagttcatgccagaacgcttcctcggtagcaggctcgacgtcaaggggcaggattatgagttgcttccattcgggtcgggacgcaggatgtgcccggggtatagtcttgggctgaaggtgatccaagtaagtctggcgaacctcctgcacgggttcacgtggaggctccctgatggcgtggagctgagcatggaggagatctttggactgtcaacaccacgcaagtacccactg

SEQ ID NO: 4089 - DNA, 700 bp, Triticum aestivum
ccagaggtgcttgccaaccactgaggagatggaccgtttgtgggcgagccgatgggtcaccgaaaaggacatgccgagccttccctatgtggatccatcgtcaaagaaaccatgcggttgcatccagtagcgccgatgcttgtaccccgcctttcccgtgaggacacgtccatcaatggctacgacattcctgccggcacacgggtgctagtcatggtctggtctattggtcgcgacccagagttgtgggaagcgccggaggagttcatgccggagcggttcctcggcagcaggctcgatgtcaaggggcaggattatgagttgcttccattcgggtcgggacgcaggatgtgccccgggtatagtcttgggttgaaggtgatccaggtaagcctagcgaacctcctgcacgggttcacgtggaggctccctgatggcgtggagctgagcatggaggagatcttcggactgtccacgccacgcaagttcccgctggaggctgtcatggagcccaagctcccagctcacctctacgttgaggcttgaatatttgatacatgtgtgctctcgtgtgttgagtaattattactacttgtgttgttttattttttctataatctttttctagtattgtatggtttgcggtgtaactaaagtgatcgagatgtgcaggaagggtgtaaaaaaatgtttggtaatt

SEQ ID NO: 4090 - DNA, 625 bp, Triticum aestivum
acccacaccaagctcttcgtcgggggcctcgcctgggagaccaccagcgagaggctccgccgcttctacgagcgcttcggggacatcctcgaggccgtcgtcatcaccgaccgccactccggccgctccaaaggatacggcttcgtgacgttccgcgatgccgaggcggccaccaaggcctgcgaggaaccgtcgccggtcatcgatggcaggcgggccaactgtaacctggcgtcgctaggtcgcgcccagccttccacacccctcgggcggccacgatcagctggctcctactttggtgttcctgtcccaaggggcatttatgtaggtggttatggtcagcaccgaccccttccgcttgggtactaccagtaccagggatttccggttccacaatacagttactccgcatatggcaccgactacatctatccacagggtacattaaacccatatgttggtcagcaatatgttccagtttacggtgtctcagctgcagcaaatactgctaaccaaccatttagccaattgagcccatccatttctggtgggggcaacggctatccgatgatgcatggttacagtatgccaggaaatcaatttgtgcatctcactgggtcaaact

SEQ ID NO: 4091 - DNA, 1291 bp, Triticum aestivum
gaagatgctaaagcgatcgtgtacagattttgagtgtagtggccttttgtcatcttcagggagtagtgcatcgtgatttgaagccagagaacttccttttcacaacacgagatgaaaatgcgcccatgaagttgattgattttggtctctctgatttcatcagaccagatgaaaggctcaatgatattgttggaagtgcatattatgttgccccagaggttctacacagatcatacagtatggaagcagacatttggagtataggtgtcataacatacattctgctctgtggtagtcggccattttgggcacggacagaatctggaatcttccgatctgtattgagagctgatcccaaccttgatgattcaccatggccttcagtgtcagctgaagctaaggattttgtgaaaagatttcttaacaaggattaccgcaaaagaatgacagctgtccaggcattgactcacccttggttgcgggatgaccaaagacagattccgctggatattcttgtctacagattaattaagcaataccttcgtgccactcctcttaaacgtttggcgctaaaggcattatccaaggctttaaaggatgacgaactcttatatcttaggctacagtttgatctacttgaacctagagatggagtcgtgtcacttgacaactttcggacggctttaacgcggtatctaactgatgcaatgaaggaatcaagaattcttgagtttttgcatgcgttggaaccacttgcatacaggagtatggatttcgaagaattctgtgcggcggctataagcccttaccagcttgaggccctggacagatgggaggagattgctggaacagctttccagcactttgaacaggagggcaaccgggtcatatcagtcgaggagttggcacaggaactaaatcttgctccgactcattattccatcgtgcaagattggatcagaaaaacagatggcaagctaaactttcttgggtttaccaaatttttacatggtgttacaatacggggggcaaacacaagacggcattaagtaaaccatgcggaaaaaaaaagatgtatctggttataattttaccgctgctcattatatggctctgattttgttgttgccccccaccccaccctgcttcttctgtcttgtggttaatgatcattcttcttctttttgtgatgtttttggttgttgtcaccatagctcttgtagagagaatacatgtaaaaatcttttgtaatgaaggcgatcggatggtttgttcgagaaatatagtgttc

SEQ ID NO: 4092 - DNA, 646 bp, Triticum aestivum
gaaggagcagacgaatgcctcgagtggctggacggcagggagcccggctccgtcgtctacgtcaacttcggtagcatcaccgtcatgaccaacgcgcagatggtggagttcgcgtgggggctggcgcagagcgggaagcacttcatgtggatcgtccgccgagacctggtgaagggcgacgccgcggtgctccccgaggagttcctggccgagacggccgggcgcgggctcatggcgtcctggtgcccgcagcagcaggtgctggaccaccctgccgtgggcaccttcctgacgcacagtggctggaactcggcgctcgagagcttgtgcggtggtgtgccggtgatcagctggccgttcttcgccgaccagcagaccaactgcaggtaccagtgcactgagtggggcgtcggcgtggagatcgacagcaacgtccggcgtgaggccgtcgccggacttatcacggagatcatggaaggggagaaggggaaaagcatgaggaagagagcgcgggactggaaggagagcacggtcaaggcggccatgcccggaggctcgtctcaccgaaacttcgacgagctggtccgcggcgtgctcctgcccaagaactagctctacaacgatcttcactgtaattacagaacgt

SEQ ID NO: 4093 - DNA, 585 bp, Triticum aestivum
gttcatgtggatcgtccgccgagacctggtgaagggcgacgccgcggtgctccccgaggagttcttgtccgagacggctggccgcgggctcatggcgtcctggtgcccgcagcaggaggtgcttaaccaccctgccgtcggagcgttcctgacgcacagcggctggaactcggcgctggagagcttgtgcggcggcgtgccggtgatcagctggccgttcttcgccgaccagcagaccaactgcaggtaccagtgcaacgagtggggcgtcggcatggagatcgacagcaacgttcggcgtgacaccgtcgccggacttatcacggagatcatggaaggggagaaggggaagagcatgaggaagagagcgcaggagtggaaggagagcgcagtcaaggcggtcatgcccggaggctcgtctcaccgaaacttcgacgagctggtccgcgaagtgctcctgcccaagaactagatctacaattgatcttcacagtaaatagagaacactattactgtatcttatttgcttgttaaggaagttcgttccttccgagagtgatgtccgttttgatgtacaaagatgaa

SEQ ID NO: 4094 - DNA, 718 bp, Triticum aestivum
ccccgctcccgctgctggcgcacgaggagatgccacgccgcgatggccatcaaccctcagcctctggaaggagcagaacgagtgccttgagtggctggacggcaaggagcccggctccgtcgtgtacgtcaacttcggcagcatcactgtcatgaccaatgcgcagatggtggagtttgcgtgggggctcgcgcagagcgggaagcagttcatgtggatcgtccgccgagacctggtaaagggcgacgccgcggtgctccccgaggagttcctggccgagacggcggggcgcgggctcatggcgtcctggtgcccgcagcagcaggtgctggaccaccccgccgtgggcgccttcctgacccacagcggctggaactcggcgctggagagcttgtgcggcggcgtgccggtgatcagctggccgttctttgccgaccagcagaccaactgcaggtatcagtgcaatgagtggggcgtcggcatggagatcgatagcaacgtccggcgtgacgccgtcgccggacttatcagggagatcatggaaggggagaagggcaagagcatgaggaagagagcagagaactggaaggagagcgcggtcaacgcggccatgcccggcggttcgtctcaccaaaacttcgacaagctggtccgcgacgtgctcctgcccaaaaactagctctacattgatcttcactgtaattagagaacactacta

SEQ ID NO: 4095 - DNA, 791 bp, Triticum aestivum
cctcgagtggctggacggcagggagcccggctcggtcgtgtacgtcaacttcggcagcatcaccgtcatgaccaacgcgcagatggtggagttcgcgtgggggctggcgcagagcgggaagcagttcatgtggatcgtccgccgagatctggtgaagggcgacgccgcggtgctccccgaggagttcctggcagagacggcggggcgcgggctcatggcgtcctggtgcccgcagcaggaggtgctgaaccaccccgctgttggagcgttcctgacgcatagtggctggaactcggcgctggagagcttgtgcggcggcgtgccggtgatcagctggccgttcttcgccgaccagcagaccaactgcaggtaccagtgcaacgagtggggcgtcggcatggagatcgacagcaacgtccgacgcgacgccgtcgcggggctcatcacggagatcatggaaggggagaaggggaagagcatgagtaagagagcgcaggagtggaaggagagcgcggtcaaggcggccatgcccggcggctcgtctcaccgaaacttcgaccacctggtcagcgacgtgctcctgcccaagtactaggtctacatcgatcgatcttacacggtaattagagaaacacatacatacgtacggagatatcttatttgcttcttaagaaagttcgtcccttcagagagtgatgatggacctgagacggagtaaccaaaaatgctaaaatacagcggacagctattgtaacggagtgctgatgtaggccatggtaagtttttcattt

SEQ ID NO: 4096 - DNA, 567 bp, Triticum aestivum
gccaccaccgctcctcgacctccatccgctctctcaactcgaaccaaggcgagttcgtcagcgaccatgtccgggcgcggcaagggaggcaaggggctgggcaagggcggcgccaagcgccaccggaaggtgctccgcgacaacatccagggcatcaccaagccggcgatccggcgcctcgctcggaggggcggcgtgaagcgcatctcggggctcatctacgaggagacccgcggcgtgctcaagatcttcctcgagaacgtcatccgcgacgccgtcacctacacggagcacgcccgccgcaagaccgtcaccgccatggacgtcgtctacgcgctcaagcgccagggccgcaccctctacggcttcggcggataggcgccccccttcgtcagcaactctgccccgctgtggccgcagacgggagaagtctgccatgtcttatgttcagtagctgtagccggaacaatgtcacctgttctcccatctgtctatcgcagaatctctctagttaccttgtagctccatgagcccagtcgtgtaatcgaatatatcgtctataccgtg

SEQ ID NO: 4097 - DNA, 1241 bp, Triticum aestivum
tgaccgtcaagccacaatatggttttggcgagcaaggaagggcggctactgaagttgaaggcgccgtgcccccgaattccacattgcacatcgatcttcagctagtttcctggaagacggttaccctcatcggtgacgacaagaggatcttgaagaaggtgctcaaggaaggagaaggctacgagcgccccaacgatggggcagttgtcagagtgggactgatcggcaagttggacgatggcactgtgttcacgaagaaaggacatgaaggcgacgaaccattcgagttcaagacggacgaggagcaggtcatccaagggctggacacgacggtgctcaccatgaagaaaggagaggtggcgtcagctagaataccacctgaacatgcgttcggatccaccgagacgaagcttgatcttgctgtggttcctcctaactccaccgtcttctatgaagtggagcttgtttccttcgagaaggagaaagaatctggggacttgaagagtaattctgagaagatcgaagcagcttctgaaaagaaagatgaaggaaatgcgtggtttaagatgggcaagtacgccaaggcttccaagagatatgagaaggctgcaaagtacatcgagtatgacagctccttcagcgaggatgagaagaagcaatccaaggcagtgaagatcagcatcaagctcaacaacgcagcgtgcaaactgaaactcaaggattacaaagaagcagagaaactctgcacaaaggttttggagctggagagcacaaacgtcaaggctctgtaccggagggcgcaggcgtacaccgagctcgtggatctggaactggcagaactagatatcaagaaggctctggagatcgacccggacaacagggaggtgaaggttgcgtacaaggcgttgaaggacaagctgagggagtacaacaagagggatgccaagttctacggcaacatgttcgccaaatggaggaagacggagaacgccgccgggaagcaggaagcgcagcctatggccatcgacagcaccgcgtgacgggtctacggcgtcgtggtacagccgggtctggatgcactagttttgtatcagcattgtaccgtggtttcggttgtcttgtcctctcttctgcaccttgtgcttcgtctgtgatcggctgcgtgccttgataatgtactcataatttgctggcgtacgattctagtaaaaaagagtgtctatttcgttttaaacgaattt

SEQ ID NO: 4098 - DNA, 609 bp, Triticum aestivum
gggctccgcggtgatgcaccccatagacgtgccggcaaggtgtgccagcacgacgagcccgcgccatcgcctgcagcatgccgaagctccggcacctggagatcgggtacatgctgatcgcgaccaacgtccgtggtggagatcgcgtcccggtgccgcgacctcagcttcctggacctgcgcggctgctggggcgtggacgacaagctgctgcaggacaagtacccggggctcaaggtcctgggcccgcgcgtggacgactgctacgagaacagcttcctggaggagtgctccgacgactcggacgacgactccatctactcgtgggaggagttcatggacgacgaggactacttcgccgccgggagcgacgacgacgaggccctgtgggacgacggccacgccctcgaggggctggaggtgaggttctacggcggcgggttcggcgagggcgccttcgccggcttcgactggccggagtctccatgaaccaagccttcttcttcatcaataagctgcttgcagatattggcctggatgttgagtgagcttgtctggaatgtaaaaaaacctgtggtgcttaaaacatagagcaacaaatcatcaata

SEQ ID NO: 4099 - DNA, 569 bp, Triticum aestivum
ctgatcgcgaccaacgccgtggtggagatcgcgtcccggtgccgcgacctcagcttcctggacctgcgcggctgctggggcgtggacgacaagctgctgcaggacaagtacccggggctcaaggtcctgggcccccgcgtggacgactgctacgagaacagcttcctggaggagtgctccgacgactcggacgacgactccatctactcgtgggaggagtacatggacgacgaggactacttcgccgccgggagcgacgacgaggaggccctgtgggacgacggccacgccctcgaggggctcgaggtcaggttttacggcggcgggttcggcgagggcgccttcgccgggatcgactggccggagtctccatgaaccaagatttcctcttcatcaataagctgtcaagagaagtgaagcctgcctgcctgcctgcttgcttgctcctgctgctgctgtctttatagcatgcttcagctttgaagcatcttcttccgtgttcgtgtgcttgtaaaaattgtgtcaaattgtgtcgtctttagctgcttgcagatattggcctggatgtt

SEQ ID NO: 4100 - DNA, 353 bp, Triticum aestivum
gtctcctggaagacggtcaccctcatcggtgaagacaagaggatcttgaagaaggtgctcaaggaaggagcaggctacgagcgccccaacgacggggcagttgtgagtgtgaggctgatcggcaagttggacgacggcactgtgttcacgaagaaaggacatgaaggcgacgaaccattcgagttcaggacggatgaggagcaggtcatcgaagggctggacacgacggtgctcaccatgaagaaaggagaggtcgcgtcagctagaataccacctgaacatgcgttcggatccaccgagacgaagcttgatcttgctgtggttcctcccaactccaccgtcttctatgaagt

SEQ ID NO: 4101 - DNA, 927 bp, Triticum aestivum
accgcgggactcccttcaagttcaagctcgggcaggggcaggtgatcaagggatgggaccagggcatcaagaccatgaagaagggcgagaacgccgtcctcaccatcccgccggacctcgcgtacggcgaggcgggctccccgcccacgatcccgcccaacgccacgctccagttcgacgtcgagctcctctcgtgggccagcgtcaaggacatctgcaaggacggcggcatcttcaagaaggtcctggtcgagggtcagaaatgggagaatcccaaggatctcgacgaagttacctgtcaagtacgaggcgagacttgaggatggatccgtcgtgtccaagtcagagggtattgaattcgcagtgaaggatggttacttctgccctgcactttccaaagccgtgaagaccatgaagaagggcgagaaggtcctcctgaccgtcaagccacaatatggtttcggcgagcaaggaaggccggcttctgaggttgaagccgcggtgcccccgaattccacattgcacatcgatcttgagctagtctcctggaagacgatcaccctcatcggtgacgacaagaggatcttgaagaaggtgctcaaggaaggagaaggctacgagcgccccaacgacggggcagttgtcagagtgagactgatcggcaagttggacgacggcactgtgttcacgaagaaaggacatgaaggcgacgaaccattcgagttcaagacggatgaggagcaggtcatcgaagggctggacacgacggttctcaccatgaagaaaggagaggtcgcgtcagctagaataccacctgaacatgcgttcggttccactgagacgaagcttgatattgctatggttcctcccaactccaccgtcttttatgaagtggacctcgttccttcgagaaggagaaagaatctt

SEQ ID NO: 4102 - DNA, 752 bp, Triticum aestivum
caccctcggcgacagcatactgctcatcccgcgctctgcttccactccgtcttcgagggcatcgccatcggagtcgccgagacgaaggcggacgcgtggaaggcgctctggacgatcagcctgcacaaggtgttcgcggcggtggccatgggcatcgcgctgctccggatgctgcccaaccggccgctgctctcctgcttcgcctacgccttcgcgttcgccgtctccagccccatcggcgtcggcgtcggcatcgtcatcgacgccaccacgcagggcgccgtggccgactggatcttcgccgtctcgatgggcctcgccaccggcatcttcatctacgtctccgtcaaccacctcctctccaagggatacgtgccccagaggcccgtcaaagccgacacgccactcggccgctggctcgccgtcgtgctcggcgtcggggtcatcgccgtcgtcatgatatgggacacctgatcctgatcgtgtggttcggggatggtttggtaattagttttggacgttagttcatattcatagtggaaggatatatactagctttaatgtgtagactactattgcctcatagtacatgtgctgtttacataatgctccctatgttccaaagttcaaaaaagcgctaggcgcgaattatgcgtttgggcacctacttgcgcttttctagcttaggcgtgattaggcaaaattaggcgcaattaggcgttagtactgtaacatgaagaaataagctagat

SEQ ID NO: 4103 - DNA, 788 bp, Triticum aestivum
gcacaaaggcaacggctcggatcaacgagcagctgagcagacgcgcacgggccgtcggcgacgggccactcgacggcgtcgatgctgcggaacgccagcaccctcggcgacagcatactgctcatcgccgcgctctgcttccattccgtcttcgagggcatcgccatcggagtcgccgagacgaaggcggacgcgtggaaggcgctgtggacgatcagcctgcacaaggtgttcgcggcggtggccatgggcatcgcgctgctccggatgctgcccaaccgcccgctgctctcctgcttcgcctacgccttcgccttcgccgtctccagccccgtcggcgtcggcgtcggcatcgccatcgacgccaccacgcagggcgacgtggccgactgggtcttcgccgtctccatgggcctcgccaccggcatcttcatctacgtctccgtcaaccacctcctctccaaggggtacaagccccagcggcccgtcaaagccgacacgcccctcggccgctggctcgccgtcgtgctcggcgtcggcgtcatcgccgtcgttatgatatgggacacctgatcgtctgaagttacatggggctggtttgttaattagttttggacgttcgttcatactgtagtatatttcatagtgcaaggataccagtagcttcaatgtaggctattgcctcatagtacatgtgctgtgataagagaactgtttacataatactactaggtgaaaacaagcaaaatgttaattcttaatattacgctcggaaaccactatcacct

SEQ ID NO: 4104 - DNA, 595 bp, Triticum aestivum
ctgcttttaaatggtgtgacctcttcaagtaaaaatgattcaaaggatgatgagtgggcatcttcagatgatgatgcagatgccatggaacatgatagtgactcagaagctgacaaatcatcagtgagtttcaaggagcaccgccgcaatcactatgatgaattccgcaaggtcaaggaactgatgcgcactggatccctggttgaagatgaggcccgtgcgaatgagcgagctgcaaacaacgtcgaagacaaaaccacaggagagaaggcaacaggcgacaagagtgaatcgccaacatcacctcaagtatgagccgcaaagtgaattctgtggtcgctaagcctagggaagttcaactaagcaggagcatgcagtttgcgcctgctctgtgtgtattggtggatccttgttttcataccagatcggatggttttctgtagccaaagaacatgttgctcttttttttcgagatgttccggtgcctaaaatgatggataattctagttgaactagctacttcaccttcagtcaggaggctagaatttgtctgcggcgctttttataatactagaactgaactatgtcaacaaga

SEQ ID NO: 4105 - DNA, 563 bp, Triticum aestivum
atccatggcccctaaggcggagaagaagccggtggcggagaagcccgagaagaccacgacggcaaagaagaccaaggccgagaagaggccaccggcgtccaaggaggcggcgagaagaagggcaagaagaagtccaagaagagcgtggagacgtacaagatctacatcttcaaggtgctgaagcaggtgcaccccgacatcggcatctcctccaaggccatgtccatcatgaactccttcatcaacgacatcttcgagaagctcgccggcgagtccgccaagctggccaggtacaacaagaagcccaccatcacgtcccgggagatccagacctccgtccgcctcgtcctccccggcgagctcgccaagcacgccgtctccgagggcaccaaggcagtcaccaagttcacctcctcttagatagcctgctcttgtgtcttctctgaatgtgttgacatctcgtgggtgtttgatgaatccactgtgctctgtagttagatgttcagaacgcagcatcttgtaatttgtgagggcacaaatgtttcaggatatggtggaaatag

SEQ ID NO: 4106 - DNA, 687 bp, Triticum aestivum
gaagatgggtcactatcaccaacacgccctttcgacaagtgtctagatgagactgttagtgctgaagctatattgactgctttaaatggtgtggcctcttcaagtaaaaatgattcaaaggatgatgagtgggcatcctcagatgatgatgcagatgccatggaacaggatggtgactcagaagctgacagatcatcagtgagtttcaaagagcatcgccgcaatcactacgatgaattccgcaaggtcaaggaactgatgcgcactggatccctggttgaagacgaggcccgtgcgaacgagcgagctgcaaacgacgtcgaagacaaacccgcaggagagaaggcaacaggcgacaagagtgaatcgtcagcatcacctcaagtatgagccgcaaagtgatttctgtggtcgctaagcctagggaagttcaactaagcgggagcatgcagtttgcgcctgctctatgtgtattgctggatccttgttttcataccagatcggatgattttctgtacgcaaagaacctgttcctcttttcatattttgagatcttgtggtgcctaaagtggtggagaattctagttacttcacgttcagtcagggggctagaatttgcctgggctgctttttataattctggaactgagttatatggacaacccttttcttcgtgagatcatgctt

SEQ ID NO: 4107 - DNA, 766 bp, Triticum aestivum
tctgtatgagattgaatcaaacaagccagtgagccagaagataacccgagcccaagacaccgtatcaccctatgatggatgaagatgggtcactatcaccaacacgccctttcgacaagtgtctagatgagactgttagtgctgaagctatattgactgctttaaatggtgtggcctcttcaagtaaaaatgattcaaaggatgatgagtgggcatcctcagatgatgatgcagatgccatggaacaggatggtgactcagaagctgacagatcatcagtgagtttcaaagagcatcgccgcaatcactacgatgaattccgcaaggtcaaggaactgatgcgcactggatccctggttgaagacgaggcccgtgcgaatgagcgagctgcaaacaacgtcgaggacaaaaccgcaggagagaaggcaacaggtgacaagagtgaatcgtcagcatcacctcaagtatgagccgcaaagtgaattctgtggttgctaagcctagggaagttcaactaagcgggagcatgcagtttgcgcctgctctgtgtgtattgctggatccttgttttcataccagatcggatgattttctgtacgcaaagaacctgttcctctttcttattttgagatgttgcggtgcctaaaatggtggagaattctagttacttcacgttcagtcaggaggctagaatttgctgggccgctttttataattctggaactgaattatatggacacccttgagcaaattttcttcttgatat

SEQ ID NO: 4108 - DNA, 743 bp, Triticum aestivum
  N_region (606)..(624): n = any nucleotide
tggagtatctgcactcgaagaacattgtgcatttcgacctgaagtgcgataacctgctggtcaacctcagggaccacgcacgccctatctgcaaagtgggtgattttggctgtccaaaatcaagaggaacaccctggtttcggcggcgtgagggggacactccctggatggccccggaattactcaacgggagtagcagcaaggtgtctgagaaggtggatgtgttctcgttcggtatcgtcttgtgggagatcctgaccggggaggagccctacgccaacatgcactatggcgcaataataggtggcatcgtgaacaacacgctgcggccgccggtgccggccaactgtgggccggagtggaggaggctgatggagcagtgctggtcgccggacccgtcgcagcggccggccttcacggagattgcggcgcggctgcggtccatgtcggccgcggccaaccagcaggccaaggcagctgcggcggccaagtagaagtacaaatcgccggctggggctgggttctggttgtgctgattggtgggaggaacgtatactacttgctacttgcggttgtggctgtggtggagtctgtggtgtatgtatnnnnnnnnnnnnnnnnnnntatagagttgtgagtgtaaaaatattggtgagatgaatgaaatgaatgaatggtgtcctcggtcgggtgtaaaaatatacacacgctatgtactattattataaacaaatattatatat

SEQ ID NO: 4109 - DNA, 647 bp, Triticum aestivum
catggcacccaaggcggcggagaagaagccggtggcggtggccgcggagaagacggcggcggggaagaagcccaaggcggagaagcgggcggcggcgaccaaggaggccggcggcgaggggaagacgaggggccggaagaagggcagcaaggccaagaagggcgtggagacgtacaagatctacatcttcaaggtgctcaagcaggtgcacccggacgtcggcatctcctccaaggccatgtccatcatgaactccttcatcaacgacatcttcgagaagctcgccggcgagtccgccaagctggcgcgatacaacaagaagcccaccatcacgtcccgggagatccagacctccgtccgcctcgtcctccccggcgagctcgccaagcacgccgtctccgagggcaccaaggccgtcaccaagttcacatcatcataggtttcgtcgtctgtttcatggattgatggcggcaggcgtcgtgcatgtagttggcagcagtacgatgttacaatctctgtaagaattgtgctgcttgcggccttgaagaaatagtgatgttgctgtttgaatcaatgttcgtctgtgcttgcgtgtcgcttcagagttcagactcttcttgatgctatttgtttatgtcagcaagttt

SEQ ID NO: 4110 - DNA, 585 bp, Triticum aestivum
ccaccgcagcacccatccccacccgtctttccggagcagcgatggcccccaaggcggagaagaagccggcggcgaagaagcccgcggaggaggagcccgcgacggagaaggccgaaaaggccccggccgggaagaagcggctgccggctggcaagaagaccgcctccaaggagggcggcggcgagaagaggggccggaagaagggcaagaagagcgtcgagacctacaagatctacatcttcaaggtgctgaagcaggtgcaccccgacatcggcatctcctccaaggccatgtccatcatgaactccttcatcaacgacatcttcgagaagcttgccggcgaggccgctaagctcgcccgctacaacaagaagcccaccatcacctcccgggagattcagacctccgtccgcctcgtcctccccggggagctcgccaagcacgccgtctccgagggcaccaaggccgtcaccaagttcacctcctcttagattccattgcctgtatccaatagctgttcgccctggttatcgccaagtagaagcagtgctagtgctggatgggagttgctgaatgcttgccgat

SEQ ID NO: 4111 - DNA, 943 bp, Triticum aestivum
tgatttgatatcgaagaaaaatattatcgagaatgacaagtcaaaaatcaagaaagtgatagaagagttggatgagaagaagaaagagaccttgaaagttacatggctgaaagttaacaaggattttgggtctatattcggtactcttctacctggtacaatggcaaaacttgatcctcctgaaggtggtaccttcttggatggtcttgaagttcgggtggcatttggaactgtctggaagcaatctttatctgaacttagtggaggacagcggtcccttcttgctcttagtcttattctggcgttacttcttttcaaacccgcgccactttacatattagatgaggttgatgctgcccttgatctgagccatacgcaaaacattggtagaatgataaaggcacattttccgcagtcccagttcatagttgtgtcgcttaaagagggtatgttcaacaacgctaacgtgatatttcgaacgaaatttgtggatggggtgtccactgtgacacgaacagtcccttcgaaacagaaatgataggcatgctatgtctgaagggacatgtgaagaactctttggtcatggaaatcaactaatcggcttcctatgttctgcgctagcgaatgccctgttgactgttggtacaaaaaaagtctcaagcccctcgcttgtaggcccttggcatcacatttgcaaacctatgcactaactcaatattagaacatgtcgtcatgttgatgtacatatatttttttcttgtgtgaatcttggcctgatggcctatattcactctatatttgtaaccgtttgtttccgttagggtctatttttgtttgaatatcaaacagtttctctaaaaaaaaaagtggactcagtattgaaaatttgaaatgacaagagatatcgaacgtataaaataaacaacgatgctatatatcaaca

SEQ ID NO: 4112 - DNA, 847 bp, Triticum aestivum
gtttgagaaggcagaggatgaatacaatgatttgatatcgaagaaaaatattatcgagaatgacaagtcaaaaatcaagaaagtgatagaagagttggatgagaagaagaaagagaccttgaaagttacatggctcaaagttaacaaggattttgggtctatatttggtactcttctacctggtacaatggcaaaacttgatcctcctgaaggtggtaccttcttggatggtcttgaagttcgggtggcatttggaacagtctggaagcaatctttgtctgaacttagtggaggacagcggtcccttcttgctcttagtcttattctggcgttacttctttttaaacctgcgccgctttacatattagatgaggttgatgccgcccttgatctgagccatacccaaaacattggtagaatgataaaggcacattttccacagtcccagttcatagttgtgtcgctaaaagagggcatgttcaacaacgccaacgtgatattccgaacgaaatttgtggatggggtgtcgactgtgacacgtacagtcccttcgaaacaaaaatgatagtcatgctttatctgaaggggtgcctaattcagggacacgactgtgaagaactctttggtcatggcaatcaactaaccggcttccaatgttctgcggtagttggattcgccacaaagtctcaagcccctcacttgtaggctattggcatcacaatatgtttgcaaacctttgtactaattcaatattagaacatgtcgtcatgttgatgtatatatttttttcttctgtgtatcttggcctggtggcgtattatattcactctatatttgtaactgttaa

SEQ ID NO: 4113 - DNA, 943 bp, Triticum aestivum
  N_region (161)..(161): n = any nucleotide
  N_region (185)..(185): n = any nucleotide
  N_region (261)..(261): n = any nucleotide
acaaagttgagtattgcgcgctgcccgcggttaactttggatggtcttattgccaatctaaagtcatttaatatgaaagcagtgtcgggtattaagtgcctcagaattgacaaaaacttcaatttaccaaaagaggattatgaggagttattatccttgtngagcatcgacaagagacaggagtngcacaaccgggctccgcgattccgtcattctaatcattttttattagattgcaatgacggatatgctcttgatatngagatgtgccccatctgtcaaagttacaaacttgtttttgactggcctgaagcggagtgcagtgacaagagatctggcaagtgcagagcatgtgaggtttgcatcaagagattccggcagtgtggaaggtgcttagaacgaaatgagaagtttgaagagaaatttgatctggtctacctttgctacaagtgtcgaggcgatccggcttcaccatctctcggtgtggaaaaggatctggtctccattttatccagtggaagaataccttctccttgaacatggaggagcaacagtccatgtccagccattcagccatctttcttagcattactgatgaagaaaaaaaaatatagtttgctattcatgaaggtgtgtggtcgtttgacagatggtacatttgcttgcaagaaaaacaaaaaaagatgttactaattccagcagaaataaagggatgattcccactattacagcctcaccagcgacaaggagggatgtttcttcatggaatttgcagttcaagagtgtataggtacatggtgagattggtgtcggtgtgttgcttgatgctgcatcttcctgtgaagaagactgaagacgaacttattccttagcttccaagtatattatatctgtatatgcgtgacattgtaatagtttgtcctggatacgtcgtgtcgtatga

SEQ ID NO: 4114 - DNA, 514 bp, Triticum aestivum
agtcatttaatatgaaagcagtgtcgggtattaagagcctcagaattgacaaaaacttcaatttaccaaaagaggattatgaggagttattatccttgttgagcatcgacaagagacaggagttgcacaaccgggctccgcgattccgtcattctaatcattttttattagattgcaatgacggatatgctcttgatattgagatgtgccccatctgtcaaagttacaaacttgtttttgactgccctgaagtggagtgcagtgacaagagatctggcaaatgccgagcatgtgaggtttgcatcaagagatgccggcagtgtggaaggtgcttagaacgaaatgagaagtttgaagagaaatttgatctggtctacctttgctacaagtgtcgaggcgatccggcttcaccatctctcggtgtggaaaaggatctggtctccattttatccagtggaagaataccttctccttgaccatggaggagcaacagtccatgtccagccattcagaa

SEQ ID NO: 4115 - DNA, 753 bp, Triticum aestivum
cagacctgaaggtgaacgggttcccgtgcaaggcgaacgcgacggcggacgacttcttcaccggggtgctcgccaagcccggcgccaccaacaccacggccggctccgtcgtcaccggcgccaacgtggagaaggtcccgggcctcaacaccctcggcgtctccctctcccgcatcgactacgcccccggcgggctcaacccgccgcacacccacccgcgcgccaccgaggtcgtcttcgtcctctacggtgagctcgacgtcggcttcatcaccaccgcaaacaagctcttcgccaagaccatctcccagggcgacgtcttcgccttcccgcgcggcctcgtgcacttccagaagaacaatgctgacaagcccgccgctgtcatctcggccttcaacagccagctccccggtacacagtccatcgccatggcgctcttcggggcctccccagaggtacccgacgacgtgctcgccaaggccttccagatcggcactgtggaggttgacaagatcaaggccaagtttgcgccaaagaagtgaaggaccggagcacgaataagattcagacttttgtaaaatacgttctcagtggttcgtttattgatttgttggttatccaataactgcgttaagcaagtcatactaatgcagtcgtgtcgtgcattcttggcgacccgactggcgacctgtgtaagtggcctgaagaaccacaaatttgtactactactaagtgggactgttggagtttcga

SEQ ID NO: 4116 - DNA, 945 bp, Triticum aestivum
acaatcgcagcagtggagtagggcgggcaccatgatgatggcccgggggtggcttcgccctgtttcttgcggtggcggcgcttgtcctcgcggtgccggcgcttgccggcgacccggactacctccaggacatctgcgtcgccgacctcaaatcagacctcaaggtgaacgggttcccgtgcaaggcgaacgcgacggcggacgacttcttcaccggggtcctcgccaagcccggcgccaccaacaccacggccggctccgtcgtcaccggagccaacgtggagaaggtgccgggcctcaacaccctcggcgtctccctctcccgcatcgactacgcccccggcgggctcaacccgccgcacacccacccgcgcgccaccgaggtcgtcttcgtcctctacggcgagctcgacgtcggcttcatcaccaccgcaaacaagctcttcgccaagaccatctcccagggcgacgtcttcgccttcccgcgcggcctcgtgcacttccagaagaacaatgctgacaagcccgccgccgtcatctccgccttcaacagccagctccccggcacgcagtccatcgccatgacgctcttcggggcctccccggaggtaaccgacgacgtgctcgccaaggccttccagatcggcactgtggaggttgacaagatcaaggccaagtttgccccgaagaagtgaaggaccggagcacgaataagattcagacttttgtaaaatacgtacaattctcagtggttcgtttattgatttgttggtcttccaataactgcgttaagcatgtcatactaatgcagtcgtgtcgtgcattatttgcgacctgactggcgatctgtgtaagtggactgaagaacgagaaatttgtactgctaagttggactgttggagtactggaggggagaatctatatctatctactaggtgttacccc

SEQ ID NO: 4117 - DNA, 881 bp, Triticum aestivum
ctccctcgcaacaactcgcccatttccctccacaccagcccgacacctcaagctcaaccccgatcgatggcgcccaaggccgagaagaagcccgcggagaagaagccggccgccgaggtcgcggagaaggccgagaagacccccgccggcaagaagcccaaggcggagaagcggctgccggcgtccaagtccgccaaggagggcggcgacaagaaggggcggaagaagaacaagaagagcgtggagacctacaagatctacatcttcaaggtgctcaagcaggtgcacccggacatcggcatctcctccaaggccatgtccatcatgaactccttcatcaacgacatcttcgagaagctcgccggcgaggcggccaagctggccaggtacaacaagaagcccaccatcacgtccagggagatccagacctccgtccgcctcgtcctccccggcgagctcgccaagcacgccgtctccgagggcaccaaggccgtcaccaagttcaccagcaactagggagggaaggtgtatctctagggttccgtcgccgtgttctcctctagcttctgtgttgccgtcggtcgtgtccatgtgtatcgttctaggtaggtagcgcgcctgctttgtaaatcgtgtcaggttgtgatggacggctttgatttcatttaatgggagaggttgtttgtgacttctcaatctgctagctgattgcgtcattctgcacaaaataattggggatctagggtttgagggagtgggtgctcgagccgccgtcagacgccgccgccactgccgatgatgttgcgagggagggtgatgcgtttggcctctcgtcataatggttcagccatggcttcagcaccgagatacatcgtgaggag

SEQ ID NO: 4118 - DNA, 678 bp, Triticum aestivum
ctccctcgcaacaactcgcccatttccctccacaccagcccgacacctcaagctccatcccgatcgatggcgcccaaggccgagaagaagcccgcggagaagaagccggccgccgaggtcgccgagaaggccgagaagacccccgccggcaagaagcccaaggcggagaagcggctgccggcgtccaagtccgccaaggagggcggcgacaagaagggccgcaagaagaacaagaagagcgtcgagacctacaagatctacatcttcaaggtgctcaagcaggtgcacccggacatcggcatctcctccaaggccatgtccatcatgaactccttcatcaacgacatcttcgagaagctcgccggcgaggcggccaagctggccaggtacaacaagaagcccaccatcacgtccagggaaatccagacctccgtccgcctcgtcctccccggcgagctcgccaagcacgccgtctccgagggcaccaaggccgtcaccaagttcaccagcaactagggttccgtcgcggtgtctctagggttccgtccccgtgttctcttctagtagcttttgtgtcgccgtcggtcgtgcccatgtgtatcgttataggtaggtagcgcgcctgctttgtaaatcgtgtcaggttgtgatggactgctttgatttcaattaatggaa

SEQ ID NO: 4119 - DNA, 641 bp, Triticum aestivum
caccttcttccagcactcacgagtcacagcccaccagcgaagccccaaccccgatcagcctcagcatcgatggcccccaaggcggagaagaagccggcggcgaagaagcccgcggaggaggagccgacgacggagaaggccgagaaggccccggcggcgaagaagcccaaggccgagaagcggctgccggcgggcaagaccgcctccaaggagggcggcgagaagaggggccgcaagaagggcaagaagagcgtggagacgtacaagatctacatcttcaaggtgctcaagcaggtccaccccgacatcggcatctcctccaaggccatgtccatcatgaactccttcatcaacgacatcttcgagaagctcgccggcgaggccgccaagctcgcccgctacaacaagaagcccaccatcacctcccgggagatccagacctccgtccgcctcgtcctccccggcgagctcgccaagcacgccgtctccgagggaaccaaggccgtcaccaagttcacctcctcttagattccgctgcctgtatctgcaactagaagtagtgttagtgctggctggaaatagttgaaagcttgccaatgctttgttggctcgttgattgtaagggttgaatttgtgctagc

SEQ ID NO: 4120 - DNA, 631 bp, Triticum aestivum
aagcatcgatgccccccaaggcggagaagaagccggcggcgaagaagcccgcggaggaggagccgacgacggagaaggccgagaaggccccggcggcgaagaagcccaaggccgagaagcggctgccggcgggcaagaccgcctccaaggagggcggcgagaagaggggccgcaagaagggcaagaagagcgtggagacgtacaagatctacatcttcaaggtgctcaagcaggtccaccccgacatcggcatctcctccaaggccatgtccatcatgaactccttcatcaacgacatcttcgagaagctcgccggcgaggccgccaagctcgcccgctacaacaagaagcccaccatcacctcccgggagatccagacctccgtccgcctcgtcctccccggcgagctcgccaagcacgccgtctccgagggcaccaaggccgtcaccaagttcacctcctcgtagattgccatgttcgcatctcagaaactgtagtttgctgccgtgtatctaaaactagtgtttattgctgaatggaaattcgtggaatgctgttagtttttggttcgattgctggtgttgccgtgtcatgtactgatctgaaatggtaaacgatgtggtgcgcatat

SEQ ID NO: 4121 - DNA, 526 bp, Triticum aestivum
gacgacggagaaggcccgagaaggccccggcggcgaagaagcccaaggccgagaagcggctgccggcgggcaagaccgcctccaaggagggcggcgagaagaggggccgcaagaagggcaagaagagcgtcgagacctacaagatatacatcttcaaggttctcaagcaggtccaccccgacatcggcatctcctccaaggccatgtccatcatgaactccttcatcaacgacatcttcgagaagctcgccggcgaggccgccaagctcgcccgctacaacaagaagcccaccatcgcctcccgggagatccagacctccgtccgcctcgtcctccccggcgagctcgccaagcacgccgtctccgagggcaccaaggccgtcaccaagttcacctcctcttagatcgctagtttctggcagtgcttgtagttacctggtgttgactcgtttgtctgaatctagaagtgttggtgatgaatgaaatttgttggatgctcttgggatgctctaaactggaatagaaa

SEQ ID NO: 4122 - DNA, 593 bp, Triticum aestivum
gcccgcggaggaggagccgacgacggagaaggccgagaaggccccggcggcgaagaagcccaaggccgagaagcggctgccggcgggcaagaccgcctccaaggagggcggcgagaagaggggccggaggaagggcaagaagagcgtcgagacctacaagatctacatcttcaaggtgctcaagcaggtgcaccccgacatcggcatctcctccaaggccatgtccatcatgaactccttcatcaacgacatcttcgagaagctcgccggcgaggctgccaagctcgcccgctacaacaagaagcccaccatcacctcccgggagatccagacctccgtccgcctcgtcctccccggcgagctcgccaagcacgccgtctccgagggcaccaaggccgtcaccaagttcacctcctcttagattgccatgtttacatctcagaaactgtagttggctgccgtgtatctaaaactagtgtttattgctcaatggaaattggtggaatgctgttagtttttcgttcgattgctgatgttgccgtgccatgtactgatctgaaatagtaaacgatgtggtgcgcatattttgggag

SEQ ID NO: 4123 - DNA, 652 bp, Triticum aestivum
tccccctccgaagcagcgatggccccccaaggcggagaagaaccgcggcgaagaagcctgcggaggaggagcccgcggcggagaaggccgagaaggcccctgctgggaagaagccgagggccgagaagcgggttccggcgggcaagaccgcctccaaggagggcggcgagaagaggggcaggaagaagggcaagaagagcgtcgagacctacaagatctacatcttcaaggtgctgaagcaggtgcaccctgacatcggcatctcctccaaggccatgtccatcatgaactccttcatcaacgacatcttcgagaagctcgccggggaggctgccaagctcgcccgctacaacaagaagcccaccatcacctccagggagatccagacctccgtacgcctcgtcctccctggggagctcgccaagcacgccgtctccgagggcaccaaggccgtcaccaagtttacctcctcttagatcgcgtcgcctgtatctagtagcaaatgtagttccttgctgttggcttagtgcttgtctgtggactctggttatctgcaagtaatattagtcctactgttggatgaaaattgctgaatcattgcaaatggtttgttggctcgttggccacctgcaagaagtgagttatgtccgct

SEQ ID NO: 4124 - DNA, 749 bp, Triticum aestivum
aagggcaagaagagcgtcgagacctacaagatctacatcttcaaggtgctgaagcaggtgcaccctgacatcggcatctcctccaaggccatgtccatcatgaactccttcatcaacgacatcttcgagaagctcgccggggaggctgcccgcggcggagaaggccgagaaggcccctgctgggaagaagccgagggccgagaagcgggttccggcgggcaagaccgcctccaaggagggcggcgagaagaggggcaggaagaagggcaagaagagcgtcgagacctacaagatctacatcttcaaggtgctgaagcaggtgcaccctgacatcggcatctcctccaaggccatgtccatcatgaactccttcatcaacgacatcttcgagaagctcgccggggaggctgccaagctcgcccgctacaacaagaagcccaccatcacctccagggaagatccagacctccgtacgccctcgtcctccctggggagctcgccaagcacgccgtctccgagggcaccaaggccgtcaccaagtttacctcctcttagatcgcgtcgcccgtatctagtagccaatgtagttccttgctgtaggcttagtgcttgtctgtggactccggtatctgcagtaatatagtcctacggtggttgaacacacacacacaaaaaacaccaacacaacaaaggggggcggctacacacacaacacacacgccaggcacacaacactaaggccaaaaagc

SEQ ID NO: 4125 - DNA, 919 bp, Triticum aestivum
ggcatcctccagggcggacgctggagatccgactccgctcggttccttctctcgtcggacataatggcggatatccagttaggatgttacactataaagtcccatggagccaaagtggcaagactccacatgtatgactggataatacttctcctccttgctgtcatagatggactgttgaatataatcgagccttttcaccgcttcattgggaaggacatgatgactgacttgagatatccattaaagggcaatactgtgcccttttgggctgttccgctcattggaattgtcttgccatgtgtcatctttggtggaatttacttcaagaagaagaatatctatgatttgcaccatggcatactgggtattctttattcggtgctcataactgcggtgattactgatgcaattaaggatggagttgccgaccacgtcctgatttcttctggcgctgtttcccagatggaaaggatctttatgataatgtcactactggcgttctgtgccatggagagaagagtgtcatcaaagaaggtcacaagagcttcccaagtggacactcatcatggtctttcgccggcctaggcttccttacatggtacttgactgggaaaatcgcagtttttgaccgtaaaggtcatattgcaaagctgtgcattattgttctgcctctacttactgctgcacttgttgctgtttctcgagtggatgactactggcatcactggcaagatgtggttgcaggagctgttctaggtttgccattttcgtagttctgtaaattcatataggtgaccttctatatttttctaaatatgcatataattattttctttttctgttgttccctgttccctttgcaggtctcacagtggcttcattttgttacctgcaatttttcccatatccttatgat

SEQ ID NO: 4126 - DNA, 581 bp, Triticum aestivum
cacaaaatgtggtaattttcatttatggatatgtaccaagagaagcaaagcaaaagcaagatggtgccaggattgttcccaataccatgttgccaaggacggagatgggtgggtggaaaatagatattctgcatccttgaagttagaaataccaagagcttttgtctgtgcggagagtaaaatatctgatgtatctgagtgggctacttgccagggaatggagtgcaaaccataacactcatggtccaacttttatggtgaacatggttggtgcggataggatgcctcagagatcgcagagttctcggtatccctttagcctggacgccgagatgatccccgaagacgaatttgagctgtggcttcaacaggcattggcgacgggcgtcttctctgacagcccgaaacgaaggaaaagctggagccccttcaaactgcctcagaaagggatcagaagttggcggcgatcgtcatgagggtgacgttaaatagcatggctacatggggcctcagatggtagcaacattgggaaaaaggcaataataacaaggtgtgtatttgtaaatagactgatcacaaag

SEQ ID NO: 4127 - DNA, 482 bp, Triticum aestivum
tgtgcggagagtaaaatatttgatgtatctgagtgggctacttgccagggaatggagtgcaaaccaaacactcatggtccaacttttatggtgaacatggttggtgcggataggatgccgcagagatcccaaagttctcggtatccctttagcctggacgccgagatgatccccgaagacgaatttgagctgtggcttcagcaggcattggcgacgggcgtcttctctgacagcccgaaacgaaggaaaagctggagccccttcaaactgcctcagaaagggatcagaagttggcggcgatcgtcatgagggtgtgacgttaaatagcatggctacatggggcctcagatggtagcaacattgggaaaaaggcaataatacaagggttgtatttgtaaatagactgaccaaaaaaatttgcctggatgagcaactaattttgtccgaaagagaaacaacaagtaaaaggaactcttaaatga

SEQ ID NO: 4128 - DNA, 969 bp, Triticum aestivum
cgcgtccggtggaaaatagatattctgcatccttgaagatagaaataccaagagcttttgtctgtgcggagagtaaaatatttgatgtatctgagtgggctacttgccagggaatggagtgcaaaccaaacactcatggtccaacttttatggtgaacatggttggtgcggataggatgcctcagcgatctcacagttctcggtatccctttagcctggacgccgagatgatccctgaagacgaatttgagctgtggcttcagcaggcattggcgacgggcgtcttctctgacagcccgaaacgaaggaaaagctggagccccttcaaactgcctcagaaagggatcagaagttggcggcgatcgtcatgagggtgtgacgttaaatagcatggctacatggggcctcagatggtagcaacattgggaaaaaggcaataatacaagggtttgtatttgtaaatagactgaccaaaaaaatttgcctggacgagcaactaattttgtccgaaaagagaaacgacaagtaaaaggaactcttaaatgaaaagacacagtgaacctgactgttgaaattagttctctctgctgggttcccacaagttgtttcaaagaaaagaccaggcatggggtcgaaacatgagtagctgttcggcgtgcgaactccatcagtgcagggatcgacgacgaaaagagtgctgacctggattacaggagcaaattctgcgggtgttgcgctgctctttctgaagcatcgctgaaggaaagatgctctgttcatggaagcagcaagttctgtgaagctcgttctggagaagagaagggggaaaaggaagaaacctgaaaagagatggtagaaactggctgctgtgtaaccatgggaaaccctgcatgagaaatgcactcgctcactgctctgtaaccattatatcactgatactactaacatcctgtggaaaaaactaccata

SEQ ID NO: 4129 - DNA, 471 bp, Triticum aestivum
caccgctcctcctccatttccatctcagtcagctccaagccgtcagccatgtccggccgcggcaagggagggaagggcctcggcaagggcggcgccaagcgccaccgtaaggtgctccgcgacaacatccagggcatcaccaagccggccatccggcgtctggcgcggcggggcggcgtgaagcgcatctcggggctcatctacgaggagacccgcggcgtgctcaagatcttcctggagaacgtcatccgcgacgccgtcacctacaccgagcacgcccgccgcaagaccgtcaccgccatggacgttgtctacgcgctcaagcgacagggacgcactctctacggtttcggcggctaggcctgcgcccgctgctgctccatcgagtcgactctgctggatgctgctgttcctctgctatggtttcgtttctgagtgcgtgtcctgctgttccataggtctgtgtagtta

SEQ ID NO: 4130 - DNA, 464 bp, Triticum aestivum
tccatttccatctcagtcaaactccaagatgtccggccgcggcaagggagggaagggcctcggcaagggcggcgccaagcgccaccggaaggttctccgcgacaacatccagggcatcaccaagccggcgatccggcggctggcgcggcggggcggcgtgaagcgcatctcggggctcatctacgaggagacccgcggcgtgctcaagatcttcctggagaacgtcatccgggacgccgtcacctacaccgagcacgcccgccgcaagaccgtcaccgccatggacgtcgtctacgcgctcaagcgacaaggacgcaccctctacggattcggcggctgacctgcgcccgctgctgctccatcgagtcgactctgctgcatgctgctgttcctctgctatgcgtttcgtttctgagtgcgtgcgttgctgttccatctgtctgtgtagttagtggaaggcgatg

SEQ ID NO: 4131 - DNA, 891 bp, Triticum aestivum
gctatactacctcattcctctcgtgcttctactagctacctgcaggctgtagatatttgtcatcgatcatcaccaacttttcagttcaagctaggtagctagccatggctagggtgctggagcctctcatcgttggaaaggtcatcggggaggtcatcgacaacttcaacccaacagtgaagatgacggtgacctacagctccaacaagcaggtgttcaacggccacgagttcttcccgtcggcggtcgtgtccaagccacgcattgaagtccagggtggggacatgagatccttcttcactctggtcatgacggacccagatgtgccagggcctagtgatccataccttagggagcatctccactggatcgtcagtgatattcctggcaccacagatgcttcttttggaagggaggtggtgagctacgagagccccaagcccaacattggcattcacaggttcaccttcgtgctgttccaacagaagaagcggcaggccatgaaccctccctccaccagggactacttcaacacgcgccgcttcgccaacgagaacgaccttggcctcccggtggctgccgtctacttcaacgcgcagcgggagacagcggcacgccgccgctgacggaaacaatcagcccaacccttcttctcttgcatgcatggcgcatgcaacaagcctatggatcaacctatagctactattagctaccatctacatatatctccactcaaataagagtttgcttgtgagcgtcttgtgtgtgctgtttccagtagtctttctactgttcagttttttcttcggtcaatttagttactagttgatctgtgaaccagtgtacgtgcaatctacatctaccactagtgtgaatttgattcagctccta

SEQ ID NO: 4132 - DNA, 718 bp, Triticum aestivum
gtggggacatgagatcttcttcactctgttcatgcggacccagatgtgccagggccctaggtgaatccatacccttagggagcatctccactggatcgtctagtgatattcctggcaccacagatgcttcttttggtaagtccttttcatgcatgactgctttatcttttgctgattggtcccatccttaatttccctgaataaacacatgaatgcatgcaggaagggaggtggtgagctacgagagccccaagcccaacattggcattcacaggttcaccttcgtgctgttccaacagaagaagcggcaggccatgaaccctccctccaccagggactacttcaacacacgccgcttcgctgacgagaacgaccttggcctcccggtcgctgccgtctacttcaacgcgcagcgggagacagcggcacgccgccgctgacggaaacaatcagcccaccccttcttctcttgcatgcatggcgcatgcaacaagcctatggatcaacctatagctactattagctaccatctacgtatatctccactcaaataagagtttgcttgtgagcgtcttgtgtgtgttgtttccagtagtctttctactgttcagttttttcttcggtcaatttagttactagttgatctgtgaaccagtgtacgtgcaacctacatctaccactagtgtgaatttgattcagctcctatttgtggagacga

SEQ ID NO: 4133 - DNA, 899 bp, Triticum aestivum
cacatcaactggcaccaatgtgcaagtggtacaatcacattgagcactcctgaagctgagtggagttactgcccctggtcaaggtgtgaaggttctgtcatcagttgtccctgaaacctcaactactgatgttgctgaggctcctgcagctgatgatgacgatgacagcgatgttgacctttttggagaggaaaccgaggaggagaaaaaggcagctgaagagcgcgctgccaaagcaaaggcttctaccaagaagaaagaatctggcaagtcatcagttttgcttgatgttaagccatgggacgatgagaccgacatggtcaagctggaggaagctgtccgaagcatcaagatggagggccttctgtggggtgcttccaagctcatgcccgttggatatggcatcaagaagctccagattatgatgaccatcattgatgacctcgtctctgtcgacactcttattgaagaccatctctgcgttgaaccagccaacgagtacatccagagctgtgacattgttgccttcaacaaaatctaaatcttcctgaggcaggtgatggcggtgggcgcacaatatatctacagttttctgttgccgtgatggtgtcgtagctaaagcaagcataacatatctgccctgtgaggtttttggaccttagatcgagttgattcgtagtattactactgagtgttatttgcttcgtatgaaatgagacaatgtggttggattcctgttgctattctcttctgtctgccgtcttcatcggagctacttgtgtgtactcgcctacttttctcccttagatgcctggacgccggagctgttttttggtttgaattaccagcagtgctcctgtgccgtgttccccagctctacctgtgtatgtgtggctagc

SEQ ID NO: 4134 - DNA, 1214 bp, Triticum aestivum
ctcctcctcgcctccccgcggccacacctcgactcgctccctcgagtagatcatctgttccatccttttgaggcgagatggcggctaccttcaatgttaacgctgaggcaggccttaaaaagcttgatggctaccttctgtctcgcagttacatctctggataccaagcttccaaggatgacttggctgtgtattctgaattctcagttgctccaccatcaacttgcaccaatgttgcaaggtggtacaatcacattgatgcactcctgaagctgagtggagttactgcccctggtcaaggtgtgaaggttctgtcatcagttgtccctgagacctcaactactgatgtggctgaggctcctgcagctgatgatgacgatgacagcgatgttgacctttttggagaggaaaccgaagaggagaagaaggcagctgaagagcgtgctgccaaagctaaggcttctaccaagaagaaagaatctggcaagtcatcagttttgcttgatgttaagccatgggacgatgagactgacatggtcaagctggaggaagctgtccgaagcatcaagatggagggccttctgtggggtgcttccaagctcatgccagttggatatggcatcaagaagctccagattatgatgaccatcattgatgacctcgtctctgtcgacactcttattgaagaccatctctgcgttgaaccagccaacgagtacatccagagctgtgacattgttgccttcaacaaaatctaaatcttcctgaggcaggtgatggcggtgggtggacaatgcagcagcacaatatatctacagttttccgttgccgtgatggtgtcgtagctaaagcaagcataacatatctgccctgtgaggtttttggaccttaggtcgagttgagtcgtagtgttattactgagtgttatttgcttcgtatgaaatgagacaatgtggttggattcctgttgctattctctttctctgccgtcttcatcgcagctacctacttgtgtgtgctcgcctactttctcccttaacagatgcatggacgctggagctgttttgtcgtttgaattacaagcatggcgcctgtgccgcgttctccagctactgcgcctgtctttgcgtggctggctggtgcttgtctaccatagtcaccagtcagttcctgctaacctgtggctatgcgtcttcgctgttcttgcctatgta

SEQ ID NO: 4135 - DNA, 1008 bp, Triticum aestivum
ctcctcctcgcctccccgcggccacacctcgactcgctccctccctcgagtagatcatctgtgtcatccttttgaggcgagatggcggctacattcaatgttaacgctgaggcaggccttcaaaagcttgatggctaccttctgtctcgcagttacatctctggataccaagcttccaaggatgacttggctgtgtattctgagttctcagttgctccaccatcgacctgcaccaatgttgcaaggtggtacaatcacattgatgcgctcctgaagctgagcggggttactgcggccggtcaaggtgtgaaggttctgtcatcagttgtccctgaaacctcaactactgatgttgctgaggctcctgcagctgatgatgacgatgacagtgatgttgacctttttggagaggaaaccgaagaggagaagaaggcagctgaagagcgtgctgccaaagcaaaggcttctaccaagaagaaagaatctggcaagtcgtcagttttgcttgatgttaagccatgggatgatgagactgacatggtcaagcttgaggaagctgtccgaagcatcaagatggagggccttctgtggggcgcttccaagctcatgccagttggatatggcatcaagaagcttcagattatgatgaccatcattgatgaccttgtgtctgttgacactctgattgaagaccatctctgcgtcgagccagccaacgagtacatccagagctgtgacattgttgccttcaacaaaatctaaatcttcctgaggcaagtgatggcggtcggtggacaatgcagcagcacaaacaatatatctacagttttccgttgccgtagctaaagcagcataacatattctgccctgtgaggtttttggaccttaggttgagttgggtcgtagtattactactgagtgctatttgcttcgtatgaaatgagacaatgtggttgattcctgttgctattttcttctgtctgccaccttcattggagctacttctgt

SEQ ID NO: 4136 - DNA, 643 bp, Triticum aestivum
cagttatgatcatggacattcttcggagagcgaaagcaaatgttgtcgttgcatccttggaaggcactttggagattgttgcatccaggaatgtgaagatggttgctgatgtgcttttggatgatgcgcttaagcagcagtacgatctcattttgttacctggtggtcttggtggtgcccaagcatatgccaaatcagataaactgattggattgatcaagaagcaagccgaggcaagcaaactgtatggagccatatgtgcctccccagcaattgcccttgagccacatggcctgctgaagggaaagaaggctacatcctatcctgctatgtggagcaaactcgcggaccaaagcgaatgcgagaacagagtcgtcgtggatggcaacatgatcactagccaaggtccgggcacttccatggaattctcgcttgccatcgtggagaagctctttggaagggaaagggccttcgagctggccaaatcaatggttttcgtgtgagtgctgttgctactagagagtgacgctgtttgtgaatatgcgaggggatgctgtgttagctggtggtttttgttgcttagtactacaaataacgcaacagctcgtaatggatggaaatgcaataaagagttcagatgaat

SEQ ID NO: 4137 - DNA, 742 bp, Triticum aestivum
gtgaaaatcctcaaattctcgtaccaattgctaatggcacagaggagatggaggcaattatgataattgacattcttcgaagggcgaaagcaaatgttgtcgttgcatctttggaaagcactttggagattgttgcatccaggaacgtgaagatggttgctgatgtgcagttggatgatgcccttaagcagcagtacgatctcattttgttacctggtggtcttggtggtgcccaagcatatgccaaatcagataaactgatcggtttgatcaagaagcaagccgaggcaaacaaactgtatggagcaatatgtgcctccccagcaattgcccttgagccacatggcctgctgaaggggaagaaggctacatcctatcctgctatgtggagcaaactcgtggaccaaagcgaatgcaagaacagagtcgtcgtggacggcaacctgatcactagccaaggtccaggcacttccatggaattctcgcttgccatcgtggagaagctttttggtagggaaagggccttcgagctggccaaagcaatggtttttgtgtgagttctgttgctacgatgaagttcctggtcagactagagtggcgctgtgaatatacgaggggatgctgtgttagctggtggcctttgtttcttactagtacaataacgcaacagctcgtaatggatggaaatgcaataaaaagttaagatgaatacgatgcagttaagaatgtggaatgacactac

SEQ ID NO: 4138 - DNA, 841 bp, Triticum aestivum
tccccatcttccctgcctccagcaaactcacacatctcaccaccggagctcccaatcccacccgaagcggcagccatggcccccaaggcagacaagaagcccgtcgccgagaacaaggtggagaaggcggcggagaaaacccccgccggcaagaagcccaaggccgagaagcggctgccggcgggcaagacggcgtccaaggaggccggcggcgaggccaagacgaggggccggaagaagggcagcaaggccaagaagagcgtcgagacgtacaagatctacatcttcaaggtgctgaagcaggtccaccccgacatcggcatctcctccaaggccatgtccatcatgaactccttcatcaacgacatcttcgagaagctcgccggcgagtccgccaagctcgcgaggtacaacaagaagcccaccatcacctcccgggagatccagacctccgtccgcctcgtcctccccggcgagctcgccaagcacgccgtctccgagggcaccaaggccgtcaccaagttcacctcctcctagactgacggcgtgtagttggtttctgtatctgtactctgcttatctatctatctgcaagtagcggtagcggtagcagtacctgtgctgggtgattgccaacgctttgttggctcgttggttgtagtaagaactcaagttgctgctttggcaaactgaaatctatctagaactcaagttgtgttcctatattctgtactagtgatcttgcctgactgatgttagcttttgacccttctgaaatgtctggccatttgtattctggttgctgaactctggttatctgcaaacagtggtaataaaaacc

SEQ ID NO: 4139 - DNA, 799 bp, Triticum aestivum
  N_region (626)..(674): n = any nucleotide
accgcgccggcatcgtgcccgtctcctacagaagggtgccgtgcgtgaagaaggggggcatccggttcaccatcaacggccactcctacttcaacctggtgctggtgaccaacgtgggcggcgccggcgacgcgcagtccgtgtccatcaagggcacgcgcaccggctggcaggccatgtcccgcaactggggcatgaactggcagagcaacaccttcctggacggccagtgcctctccttccgggtcacctccagcgacggccgcaccgtcaccagcaacgccgccgcgcccgccggctggcacttcggccagaccttcgagggcgcccagttctagtccgcttcctcctcttctcttctccacaagcataagcgctggagagaagagacggagcactatattcaagaattattttggcattcgcgtgcgtgcgtgcaggaggaggaagaaaggccggccggcctcttcgttatagtgaaggaggacgctccgggctacgctgaggctgctaattagcacccgcttagacgctttccttctctcgatcaaagtctcaagtttactgaagactcgaacaaccatccatcaagtaccgtaccgtacgtagcagcttggcactccttnnnnnnnnnnnnnnnnnnnnnnnnnnnnnnnnnnnnnnnnnnnnnnnnnttaataatggcagtagttatgatcagtactagaagtacctttggtggtttgtaccagtactaatttgtactacggggtggtggcccttgcgatgaaattgaagatttgcaaggccatatttatgg

SEQ ID NO: 4140 - DNA, 429 bp, Triticum aestivum
cagcggagatgtctgggcgcggcaagggcggcaaggggctcggcaagggcggagcgaagcggcacaggaaggtgctgcgcgacaacatccagggcatcacgaagccggcgatccggcggctggcgcgtcggggcggcgtgaagcgcatctcggggctcatctacgaggagacccgcggcgtgctcaagatcttcctcgagaacgtcatccgcgacgccgtcacctacacggagcatgcgcgccgcaagaccgtcaccgccatggacgtggtctacgcgctcaagcgccagggccgcaccctctacggcttcggcggctaggctttccgttcctcgtagcggcttgtttgctggtggtgtggtggtggtagtttggtgtcgaatgttgtgttcctgatgtaaccgtgccctgttgcagtgaagtaaatcc

SEQ ID NO: 4141 - DNA, 785 bp, Triticum aestivum
gcggcctgctctactgggtcgcccagctcctgggctccaccgccgcctgcttcctcctccgcttctccaccggcgggctccccaccggcaccttcgggctgaccggcatcggcgcgtgggaggcggtggtgctggagatcgtgatgaccttcgggctggtgtacacggtgtacgccacggccgtggaccccaagaagggcagcctgggcaccatcgcgcccatcgccatcggcttcatcgtgggcgccaacatcctggtcggcggcgccttctccggcgcgtccatgaaccccgccgtctccttcggccccgccctcgtcagctgggagtgggggtaccagtgggtgtactgggtcggccccctcatcggcggcggcctcgccggcgtcatctacgagctgctcttcatctcccgcacccacgagcagctccccaccaccgactactaagcaaccaagcttgcatgcgagctcgccgtccatccgtgtgatgatcgatcgcgtctcgtcatcgtctccttccttgccatcgccatgagtcgttttagtttgctttgaatgaatccatccatccctgggtcgatcggtcggccagtagtcgagtcagtttgtggtgcgttcgtgcgtggagctgtaaaagcgtggatgatctcgatctgggacgaccgaccctgtcaatttgcttctgtaaaactgtgaattcgcccgccccgcccgagtaatttcaagttcagttgagtttgaacccgtcgtgccttcttggtaggaacttgaattctggaatta

SEQ ID NO: 4142 - DNA, 1143 bp, Triticum aestivum
cacatcaggggattggacctttacttacgttggacaataaaagaattgatagccaatgtacggcttagttgatgatacagtggaattttcattggccacgcgcttgctctccatagggatgatcgtcacctcaatgaaccagcacttgatactgtgaaaaggatgaaattatattcggagtctcttgcacgttttcaagggggctcgccttatatttatcctctatatgggctgggtgagctgccacagggttttgcacgtctaagtgctgtttatggtggcacttacatgttaagtaagccagaatgcaaggttgaattcgatatggaaggaaaagcgtgtggtgttacatcagaaggtgaaaccgcaaaatgcaagaaagttgtctgcgatccttcgtacttgacctacaaggtcaggaagatcggcaaagttgcacgtgcaattgctattatgagccatccaatcccaaatacaaatgagtcccactcagtccagattattttgccacagaaacaacttggacgcaattcagacatgtatgtcttctgttgctcatacacccacaacgtcgcaccaaaagggaagttcattgcatttgtctctgcagaagcggagagtgataatatacaatccgaacttaagcctggcattgatctacttggtccagtagatgagctcttttttgatatgtatgacagatatgaaccagtgaacgaaccatctcttgataattgcttcatctcaacgagctatgatgctaccacacattttgagactactgtgacagatgttcttaacatgtatacatgatcaccggaaagactattgatctgcgttgatttgagtgctgctagtgctgctgaagaagaatactagatttcataatcaaatacggctgttctcttcaacctgcaggacaaccataacaatgtcctgactatttcacccgcagatcaaatctggtgttatggccattgtcttccgcatgcttgtcgcttgcagcatatggaaaaaatgctggttccagacgattgaaccatcgtggttttatttactactgtactagaagagtaattagtgaatggtgtgaacagtgagcagggttggctatgaactttgtggttttattgtatgtatcat

SEQ ID NO: 4143 - DNA, 1121 bp, Triticum aestivum
tcatctctctccactccggccggccagccagtctcttcttcttcttctccagcgagcgagcgagctaggctcggaggtgagcgaaaatgccggtcagcaggatcgccgtggggagccaccgtgaggtgtacgaggtgggcgccctcaaggcggcgctcgccgagttcatctccacgctcatcttcgtcttcgccggccagggctccggcatggccttcagcaagctgagccccgacggcgcggcgacccccgccggcctcatctcggcggcgatagcccacgccttcgcgctgttcgtggcggtgtccgtgggcgccaacatctccggcgggcacgtgaacccggccgtgaccttcggcgccttcgtgggcggcaacatcaccctcttccgcggcctgctctactggatcgcgcagctgctgggctccaccgccgcctgcttcctcctccgcttctccaccggcgggctccccaccggcaccttcgggctgagtggcatcggcgcgtgggaggcggtggtgctggagatcgtgatgaccttcgggctggtgtacacggtgtacgccacggccgtggaccccaagaagggcagcctgggcaccatcgcgcccatcgccatcggcttcatcgtgggcgccaacatcctggtgggcggcgccttctccggcgcgtccatgaaccccgccgtctccttcggccccgccctcgtcagctgggagtgggggtaccagtgggtgtactgggtcggccccctcatcggcggcggcctcgccggcgtcatctacgagctgctcttcatctcccgcacccacgagcagctccccaccaccgactactgagcagcgagctcagcgcagccagcctgcttgcttgcgtgcaagcccgccgcctgcctgcccgtccgtccgtgtgatctatgatcgcgtcgtctccttccttgccatcaccatgagtcgtttaagtttgcttcctgggtcgatcagtttgtggtgagttcgtggagctgtaaaaccgtggacgacactgtcaatttgcttctgtaaaactgtgaattcgcccgtcccgcccgagtaatttcaagttgagttgagttcgaccgtgcctctgaaaacttgaattct

SEQ ID NO: 4144 - DNA, 1146 bp, Triticum aestivum
ctctctcgactccggccagtctcttcttctctagaaagctagcgaggcttggaggtgagcgaaaatgccggtcagcaggatcgccgtggggagccaccgtgaggtgtacgaggtcggcgccctcaaggcggcgctcgccgagttcatctccacgctcatcttcgtcttcgccggccagggctccggcatggccttcagcaagctgagccccgacggcgcggcgacccccgccggcctgatctcggcggcgatagcgcacgccttcgccctgttcgtggcggtgtccgtgggcgccaacatctccggcgggcacgtgaacccggccgtgaccttcggcgccttcgtgggcggcaacatcacccctcttccgcggcctgctctactggatcgcccagctcctgggctccaccgccgcctgcttcctcctccgcttctccaccggcgggctcccccaccggcaccttcgggctgaccggcatcggcgcgtgggaggcggtggtgctggagatcgtcatgaccttcgggctggtgtacacggtgtacgccaccgccgtggaccccaagaagggcagcctgggcaccatcgcgcccatcgccatcggcttcatcgtgggcgccaacatcctggtcggcggcgccttctccggcgcgtccatgaaccccgccgtctccttcggccccgccctcgtcagctgggagtgggggtaccagtgggtgtactgggtcggccccctcatcggcggcggcctcgccggcgtcatctacgagctgctcttcatctcccgcacccacgagcagctccccaccaccgactactaagcagcgagcttaggatcggagtcgccgtccatccgtccgtgtgatgcttcgtctcccccttccttcccgtcatcagtcgttttagtttctcgcgcggtcgccgcatgccatgatgcatgtatgcggagctcgcctcgtttgctttgaatcaatcagtcctgggatccgtcgatcggtcggtcagtcgagtcagtttgtggtgcgtgcgtggagctgtaaaagcgtggatgatctcgatctgggatgaccgacccagtcaatttgcttctgtaaaactgtgaattcgcccgcccgagtaatttcaagttcagttgagttggaatggat

SEQ ID NO: 4145 - DNA, 622 bp, Triticum aestivum
ccttcaagctcatccacacaagcacctctcggctctcccggtcgaagcatccgcatcctcatccatggcccccaaggcagccgagaagaagccggtggagaagaccccggcggggaagaagcccaaggcggagaagaaggtgccggcgtccaaggagggcggcggcgacaagaagggcaagaagaaggccaagaagagcgtggagacgtacaagatctacatcttcaaggtgctgaagcaggtgcacccggacatcggcatctcctccaaggccatgtccatcatgaactccttcatcaacgacatcttcgagaagctggccggcgagtccgccaagctggcgcgctacaacaagaagcccaccatcacgtcccgcgagatccagacctccgtccgcctcgtcctccccggcgagctcgccaagcacgccgtctctgagggcaccaaggccgtcaccaagttcacctccgcctgatctggccgtctccgtttgtcttctttgatggatgtatcggtgttgctctgtagtagttagctgttcgtgctctgtcgtgttgtagcttgtgctggttgttttggatcacatttcatgatccggagaaatagtaattcagttcttgac

SEQ ID NO: 4146 - DNA, 958 bp, Triticum aestivum
ttcttccttcttgcatctagaaactttacattccccaaaggttaaaaaaagggtagcgctaaggttagccaaaggtaaaaaagaaaaggctaatccatccgtccgcccgtccactgacgacgactgatcagacggccggcatggtctcgtggcggagcacggcgagatcggacggcccgaaggactcgtcgccgaagccgaagaggccggcgtcgaagccgtcgtcgccccactcggccgcggccgcggcggcagccgctgccgcctccggcgaggaggcgacgccgccgaaggcgtaggcgccgtcaatctcgtccgcgatgccccccaaggcggagaagaagccggcggcgaagaagcccgcggaggaggagcccgcggcggagaaggcggcgagaaggccccggcggcgaagaagagcgtggagacgtacaagatctacatcttcaaggtgctgaagcaggtgcaccccgacatcggcatctcctccaaggccatgtccatcatgaactccttcatcaacgacatcttcgagaagatgccgatgtcagggtgcacctgcttcagcaccttgacatcggcatctcctccaaggccatgtccatcatgaactccttcatcaacgacatcttcgagaagctcgccggggagtccgccaagctggcccgctacaacaagaagcccaccatcacctcccgggagatccagacctccgtccgcctcgtcctccccggggagctcgccaagcacgccgtctccgagggcaccaaggccgtcaccaagttcacctcctcctagactgacgatgcgtcgcttgttgtgacagatgtggctgtctgatgtatctgcaagtagaagtagtagttcgtgtggtagaagattgccacgctttgttggcttcttggttgtgagaactgaacgtgttgcttttgcaactgaaatctatctaaaaaatgtt

SEQ ID NO: 4147 - DNA, 761 bp, Triticum aestivum
gtgttagtatgggcaatcctcattgcatcacgtttggttcaaaagagttgaaggttctgcatgttgatgatttgaagcttagtgacattgggcccaaatttgagcatcatgaaatgtttcctgctcggaccaacactgaatttgtggaggtcttgtctcgctcacacctcaaaatgcgagtttgggagcggggtgctggagcaactcttgcttgtgggactggtgcttgtgccgttgttgttgcagctgttcttgagggccgagctgaacggaaatgtgtagttgatttgcctggtgggccattggaaattgagtggagggaggataacaatcatgtttacatgactggtcctgctgaggctgtcttctacggatctgttgtacactaggtgctggggacgaagatggaagggttacataactcagagcctgaaaaaatgattacaaggtctctcaaaacactttcctggtaccagtgtccctcccttcttgataatgactgctcactgtgggcaaaaacgagggaatgctatgggcagaattagaggctttcttttgaaccaatttaggtgtattttacattttaaccttttgtactccttcagtatcatgttagaaccctgtgttgggttatggatctgtcctgtcttctttctttgctaataagcttgggctgcctatgcatagcttgaatattgttgtctacaaatttaccttgatttactgcataatgattgggcttatctgttaattggtgagat

SEQ ID NO: 4148 - DNA, 1268 bp, Triticum aestivum
atgagagcgctcaaatggattttgctaaggtagagaagcgtgtgcgcacacaggcggtggaagcactggaactgttaggaatttgcgtatcagagaagacactgcaagtatcttctgaatcttgatgtgaactctgcatattatgatccaaaacccgctcgatgcgtgaggatcctttgccagatgcagaccccaatgataaattctatgtgggtgataaccaaaatagacttagtggacaagctcttgagttcaagcaactcaatgtccatgcatgggaggcttttgacaaggggcaggatttccatatgcaagcagctccatctcaagctgaactactgtacaagagtttcaagatcaagaaggagaagttgaaatctgaaagcaaggacaaaattatggagaagtatgggaatgctgcatctgacgaaccaatccctcgtgagcttcttcttgggcaaagtgaaaaagagattgagtatgaccggactggtcgcataatcaaaggacaggatgtagctcttcctaagagcaaatatgaagaggatgtcctaattaataaccacacaacagtgtggggttcatggtggaaagatcatcaatggggctataagtgctgcaagcagactattaaaaatagttactgcacaggccttgctggaatcgaggctgctgaagcatcagctgatttgatgagggaaaatatggcccgcaaggaggccgccgaagaggaacctgtacgacaagaagaaaagaaactagccacttggggaacagatattcctcaggatcttgttctggaccagaagttgcttgaggaatccttaaagaaggaggcaaagaggaagaaggaagagatggacgaaagaaagaggaagtacaatgtgaagtggaacgacgaggtcaccgccgaagacatggaggcctaccgtatgacgagagtccgccatgacgatcctatgaaagattttctcaattaggagttcatgtccgctggttgcgtggcagctgttatctaatgcatgtgtaagctggccacgcctgaagtactgctgctgtctgtccattcttcgctggattgttgtgtctgtattctcggccatctctaggaagacgggatgggatggcatgccggttcgtgagttactgatgttgtgaattacagatatgatcgcgtgatgtccaaaagcagaacgaagtttgttctcatatgttctttgtaacatcctggtaaccacggcgtacgcccaattaattgatgagtaata

SEQ ID NO: 4149 - DNA, 1069 bp, Triticum aestivum
attctatgtgggtgataaccacaatagacttagtggacaagctctggagttcaagcaactcaatgtccatgcatgggaggcttttgacaaggggcaggatttccatatgcaagcagccccatctcaagctgaactactgtacaagagtttcaaaatcaagaaggagaagttgaaatctgaaagcaaggacaaaattatggagaagtatgggaatgctgcatctgacgaaccaatccctcgtgagcttcttcttgggcaaagtgagaaagagattgagtatgaccggactggtcgcataatcaagggacaggatgtagctcttcctaagagcaaatatgaagaggatgtcctaattaataaccacacaacagtgtggggttcatggtggaaagatcatcaatggggctataagtgctgcaagcagactattaaaaatagttactgcacaggccttgctggaattgaggctgctgaagcatcagctgatttgatgagggaaaatatggcccgcaaggaggctgccgaagaggaacctgtacgacaagaagaaaagaaactagccacttggggaacagatattcctcaggatcttgtcctggaccagaagttgctcgaggaatccttaaagaaggaggcaaagaggaagaaggaagagatggacgaaagaaagaggaagtacaatgtgaagtggaacgacgaggtcaccgcggaagacatggaggcctaccgtatgacgagagtccgccacgacgatcctatgaaggattttctcaattaggcgttcatgtcccctggttgcttggcagctgttgtgtaatgcaggtgtaagctggctacgcctgaactcctggtctgcccatcctttgccggattgtcgtgtctgtattctctgcgatctctaggaagacgggatggcatgccagttcgtgagttgctgatgttgtgaagtacagatatgactcgtgatgtccaaaagcagaatgaagtttgttctcatatgttctttgtaacctcttggtaaccatggcatacgcccacttatatggatatttgtaccgttcatgagtaa

SEQ ID NO: 4150 - DNA, 1232 bp, Triticum aestivum
tgagctctctaatgacaagattgactcgtatgtcctctctgaatcaagcctcttcatctacccgtacaaggttgtgatcaagacctgcggttacaccaagctcctgctggccattccaaggattcttgagcttgctgaggagttgtccctgccacttgctgctgtgaagtactcccgtgggacattcatattccctgaggcacagccttctccacacaagaacttctctgatgaggttgccttcctgaatggctactttggtggactcaagtctggcggcaatgcctatgtcattggtgatcctgcaaagccaggccagaagtggcatgtctactatgccacccagcagcctgagcagcccatggtcaaccttgagatgtgcatgactggtctggacaagaagaaagcttctgtcttcttcaagacctctgctgatggctacacatcttgtgccaaggagatgaccaagctctctggcatctctgaaataatcccggagatggagatctgtgactttgatttcgagccatgtggctactccatgaacgccatccatggctctgctttctccaccattcatgtcacccctgaggacggcttcagctatgctagctatgaggtcatggggttggaccctgcctccatggcctatggtgacctggtcaagagggtgctgagatcctttggcccgtctgaattttctgttgctgtgaccatcttcggcggtcacagccttgctggcacctggggggagaggctgaatgttgggatctatgatagtaccaacatggtcgtccaggagctgcctgacgggggcgctctcatctaccagagcttcactgctgtcggcgaagacttcaccgggtcaccaagatctgtcctgaattgcaacgttgatggcaatttagttactggctgcaagatggatgctttcctttgctgggaagacgatgctgcgcaggagaaggatgagaggggggctggtaagaagatgaagagctcctgatggtgatgctagctggtctgaatgagcttgttgcgtcagtttgttcttagatttccttttcctgctcctgtcctagtactctgttatgggcaagtgacgtgaaaatggttagcgttttctgccagtgtgagcgaatgtatggaaatgcctgcatctggctgcatggtttatgaatataaagaataagccttgtattgagcaaatgttattttgttatttcctgaaa

SEQ ID NO: 4151 - DNA, 671 bp, Triticum aestivum
aaaagtgtcttgtttacgagcttatacgcaatggaagtgtggaatcccatcttcatggtgctgacaaggataagggcatgctgaactgggatgtcaggatgaaaattgctttgggtgctgctagaggcctggcgtacctacatgaagattcaacccacatgtcatacaccgcgacttcaaaggtagcaatatattgctggaggatgatttcactcccaaggttactgattttggtttagcaagggaagcaaccaatggaatcaatcctatttccacaagggtaatggggactttcgggtatgttgctccagagtatgccatgacagggcatcttcttgtcaagagcgatgtctacagttatggggttgtcttgctggagcttttatcaggaaggaagcctgtaggcatgtcggacaacatggatcctgagaaccttgtgacttgggctcgtcctcttctaggcaatagagagggcttggagaggctgatcgacccttctctgaacggcaactacaatttcgacaacgtagccaaagtggcgtccatcgcttcggtgtgcgttcacagcgatccgtcacagaggccattcatgggtgaagtagtccaggcactgaagctgatttacaatgacgcagaggaggccgttggtgattcctacagccacagggagt

SEQ ID NO: 4152 - DNA, 1302 bp, Triticum aestivum
  N_region (45)..(45): n = any nucleotide
  N_region (134)..(134): n = any nucleotide
  N_region (171)..(171): n = any nucleotide
  N_region (1082)..(1105): n = any nucleotide
gacaaggataagggcatgctgaactgggatgtcaggatgaaaatngctttgggtgctgctagaggcctggcgtacctacatgaagattcaaacccacatgtcatacaccgcgacttcaaaggtagcaatatatngctggaggatgatttcactcccaaggttactgatttnggtttagcaagggaagcaaccaatggaatcaatcccatttccacaagggtaatggggaccttcgggtatgttgctccagagtatgccatgacagggcatcttcttgtcaagagcgatgtctacagttatggggttgtcttgctggagcttttatcaggaaggaagcccgtaggcatgtccgacaacatggatcctgagaaccttgtgacttgggctcgtcctcttctaggcaatagagagggcttggagaggttgatcgacccttctctgaacggcaactacaatttcgacaacgtggccaaagtggcgtccatcgcttcggtctgcgttcacagcgatccgtcacagaggccgttcatgggtgaagtagtccaggcactgaagctgatttacaatgacgcagaagaggccgtcggtgattcctacagccacagggagtcatcatgtgacccggacgacgacctcccggcgggcttcatctttgacagtggtagcggcagctggtggaacagcggggcttccgggtgcctggactaccggaacccctcgccattcataaacatggagtacaggctccggccgaatagaagcgaggcaggagcgcgacggtgacccttactcggtagcgtcgacgggcggccgtgtacaaaagccagcaccccagagtagatcagcccctctgcagatcaggaagctctccccgtctcactggtcaagaggcagcttcagcgagcacgggcggcggcctcgccattgatttgatataaactagcgttagaccgactgttagcttcggttttttagacttgatgagacaggggctgggggggaatgccattcgctgattcgcctcccgtcgattcgtgcctctggtcagtgtacagttttccgacagagtcccagccagtgannnnnnnnnnnnnnnnnnnnnnnnggtagtctgatgatgtttgtaatctgccttgagctgccctgcttccctagaagaaacgacgacggggctggcggcgcggctggcagatgctgtctaatttttggagatggcagttcgtttgaaatgtgtcaggtttgtgtgatcttggtagggggattattgccagaaatctgggcgatatcatacgtgttggtgta

SEQ ID NO: 4153 - DNA, 649 bp, Triticum aestivum
tgctacatgaacagctgctcacaggcctgcactactgccacgtcaatcaggtctgcatcgggatatcaaaggttctaaccttttgatagacaatgagggtaacctcaagcttgctgattttgggcttgcgaggtcattctctagtgatcacaatggcaacctgactaaccgtgtcatcaccttgtggtacagacctccagaactgcttctcggaagcacaaggtatggtccagctgttgacatgtggtctgtgggctgtatttttgctgagcttctcaatggaaagccaatcctgccagggaagaatgagccggagcagctgaccaaattttcgagctttgtggcacccctgatgagttaatctggcctggtgtcactaagatgccatggtacaacaacttcaagcctccccgagtgttgaagagaaaagttaaagatgcctttaaacattttgaccggcatgctctggacctgttggagaggatgttaactttagatccatcacagaggataccagcgaaggaggcacttgatgcagagtatttctggactgatcccttgccatgtgacccgaaaagtttgccatcgtatgaagcatcacacgaattccagactaagaaaaaacgtcagcagcagaggcaagcggagg

SEQ ID NO: 4154 - DNA, 1016 bp, Triticum aestivum
atagacatgagggtaacctcaagctggctgattttgggcttgcgagctcgttctctagtgatcacaatggcaacctgactaaccgtgtcatcaccttatggtatagacctccagaactgcttctcggaagcacaaggtatggtccagctgttgacatgtggtctgtgggttgtatttttgctgagcttctcaatggaaagccaatcctgccagggaagaatgagccggagcagctgaccaaaattttcgagctttgtggcacccctgacgagttaatctggcctggtgtcactaagatgccgtggtacaacaacttcaagcctcccagagtattgaagagaaaagttaaagatgcctttaaacattttgaccggcatgctctggacctgttggagaggatgttaactttagatccatcacagaggataccagcgaaggaggcacttgatgcagagtatttctggactgatcccttgccatgtgacccgaaaagtttgccatcgtatgaggcatcacacgaattccagactaagaaaaaacgtcagcagcagaggcaagcggaggaagctgcaaagcgccaaaaaataaatcatcctcccccacattctcgcttgcctccgatccagcatccaggccaatcacaccagatcaggcctggccatgcgccacctgtggcaggtggctcgagccactatgcgaaacctcggggacctggagggcctaacaggtacccgcagggtgggaaccaaggcgcaggctataataacccgaaccgcggagggcaaggcagtggctatggcagcgccccgtatcctcagcaaggaagaggacctcctccgttccctgcagcaggtgctccacgcggtggtgaccaggacagatggacatatggagtcggtggcacccataattacccacacaggcggatccgccgatatggcacagtatggatcacaaggaccgaggaaggccccaactatcatcaaggcaggttcatcagcaaatcagcagcagta

SEQ ID NO: 4155 - DNA, 698 bp, Triticum aestivum
  N_region (48)..(48): n = any nucleotide
ctcactcccacttccaccttcgaagctccagcggcagccatggccccncaaggcagacaagaagccggccgccgagaacaaggtcgagaaagcggcggagaagacccccgcgggcaagaagcccaaggccgagaagcggctgccggcaggcaagacggctgtccaaggaggccggcggcgaggccaagacgaggggccggaagaagggcagcaaggcgaagaagggcgtggagacgtacaagatctacatcttcaaggtgctgaagcaggtgcacccggacatcggcatctcctccaaggccatgtccatcatgaactccttcatcaacgacatcttcgagaagctcgccggcgagtccgccaagctcgcccgctacaacaagaagcccaccatcacctccagggagatccagacctccgttcgcctggtcctccccggcgagctcgccaagcacgccgtctctgagggcaccaaggctgtcaccaagttcacctcctcttagactgacgctgcgtcgcttgttatgacagatgtagttggctgctgttttcttctgttagtggtcgctgactctgcttatgtatctccgactagtggtaggaatggtcctctctgtgctggatgattgccacgcttcgttggctcgttggttgtgagaactgaagttgctaatctatctgaatgttattgtttcaag

SEQ ID NO: 4156 - DNA, 1745 bp, Triticum aestivum
  N_region (1597)..(1597): n = any nucleotide
ggcaaagcataaaaaaggctacacgcgccatgtgtcgccgcgcgtcctcacacgtgcccccctcctttcattcccatcgggcgacgttgcacaaccccttatccgcccaacaaccagagtccagagctagtcaggtagtatcacgggcctataaatacaagaccaaccaactacagggcaagccgatccatcgttactcacagcctcacacgcaaaaaggccagaaagaagtggttttagcctgtgacagacccatcagcgtcgtgctcacgagggacctgccgccattgctgcaacttggaacttcatcttcccatcgtgatataaaggagaagctcgacacgatgcagagcgcccagcagaaagcgaggaggaagaacgcgcaggtgctggacgggtccgacatccgggagctggtggagaacgagggggcgttcgcgaagttcgtggagaacaagttccggcaccttgacgccgacggcgacgggaggctgtcgctgagggagctccagcccgccgtcgcggacatcggggccgccatcgggctgccggcgaaggggtcgtcggcgcaggcggaccacatctactccgaggttctaaatgagttcacccacgggaagcaagattcggtgagcaagccggagttccagcacgtgctgtccgacatactcctcggcatggcggccgggctcaagagggacccgatcatgatcctgaggatggacggggaagacctgaatgagtttgtcgagagcacggcgtacgaagcagaggcggtcgccatattctctcaaatcgagtccgggaatgcgtcgttgcgacaatgtttgcccgccgctcttcggcagctgacggtcgatcacggcatgccaccggcttcggactctctggttatggagaaggtcattgaacctgcattgcaggaactgccagcagatcagctcgaccgaccggcatcgcaagaggtcttcttccaagaattcaagaagtatttgggagtgatcgcccggcgactccaggagcgcccgataattgtggcgcacactgagaacacctttgatggggctggcattaggaagatactgtccaacaagttcgagttcgagaagctgctggattctgtctgggtagatgtacccaaggaacacaaagatagaacatcgaagaagtaccttcgcgtcgcgcttgacaagttggccgcctcagtaaatctaccaccatacggagctgttgatcaggtggatgttgtggtgaatgaggcgttcaagatggccaacgccgacgacgggaaggaggtggacgaggccgagttcaagaagctgctcaccgagatcctcggggcggtgatgctgcagctagacggcaacgccatcgcggtgtccacctacacctcctccacgagcccatgtccacttcgtcgaccttgttgtcaccgtcgccgtcgccgcccacggtgtcaccgccgagcgagtagacacatgtttggtagagtaacagtttccgctgacgctgtaactgcgaccgacgccggaatccacctgcttacactgcaataacgtgacgtttttgcctgtaacgtcaacctgagacggggtgnttatatgcatacagttggtgatcatgtaacctgctcggtgatttgtgatgaaataaggctttgcgtgccagaagggaacaagtgtagggactgagatatgtcatcatcacaaactgattcccgtttgatgaaagactagcaaacagtg

SEQ ID NO: 4157 - DNA, 745 bp, Triticum aestivum
gagggcctcgcgcggcccatggacgacgccggcgtccctggctcttcagagacaaggcctacctccacccgaaaaaggtggtggacctgggggagaagggcggtgcccgcctgggcctggaaggtggaggacgaccccaaggagaagaggactggaggcagcctccagggagaagaaaggacggcatcgaacaagtggcgcacaggcaggtccggcgcatcctctggtccgggctggggctgatcatgtcccagatcggcctcttcttccgcctcaccttctgggagctctcctgggacgtgatggagcccatcgccttcttcaccaccgcgtccgggctgctcgtcagctacacctacttcctcgtgacatcgagggacccgacgtaccaggacttcatggagaggctcttcctgtccaggaggaggaagctctgcgccaagcacaggttcgacatggagaggtacctggagctgcacaggctttgcaagtgccctctcgaaggccactatcctcatggccccaagcttcacaacttgtaacgccagggctagaatttcccagctggactctctggattgtgcaataggcaaatatatagcttccaaagtgttcgctgcatctttgcagaagtcaccagttacctgctagattaatcttgcagacatactaaaggctaatctcagtgatgggccactgtcattatgccattatggttctctatgttttaaagttgaagtacttc

SEQ ID NO: 4158 - DNA, 827 bp, Triticum aestivum
  N_region (208)..(208): n = any nucleotide
tgaccattatgagtcttacatagataagcctcagggctgaacatcaaataaactcaagcagcggagatcttcgttgataggtagaacccatgccatctgccttaaccctacaggcattctgacgtgggaaagcgtcctagttcgcatgttctgtctccaaagaacttttcttcaaattctctgctcttccatgcctggacaattaaanaaactgatttcttgtgtaggggtacgacacggtggtcggggagcgcggcgctcagctgtcgggagggcagaagcagcgggtggcgatcgcacgggccgtggccaaggaccccaggatcctgctgctggacgaggcgacgagcgcgctggacgcggagtcggagcgggcggtgcaggacgcgctggaccgggtggcggcgagccggacgacggtggtggtggcgcaccgcctgtcgacggtccggggcgccgacgtgatcgcggtggtgaaggacggcgcgatcgtcgagaggggcacgcacgacgccctgatcgccgtcaagggcggcgcctacgcgtccctcgtcgccctccactccgcgtcgtcggcgtcgtcgtagcgccgctccaagaggggcgctcgcgaatgaaatcgtgccgagcctgcgagattgttgggggtggcacgcctggtaattattaccacgttcggttcaggtgtcagttcgctgtgaaaatgaaaccctatcatcaagaatcagaatacctaagcacgaacgctttatatttctttctagaaaaaggaacaagaaagttctataggaataacaatacccaaatatatctgctacgtatcaaaa

SEQ ID NO: 4159 - DNA, 760 bp, Triticum aestivum
gacgcgggccacatacttctggacggggtggacatccagaagttccaggtgaggtggctgaggcagcagatggggctggtgagccaagagccagccctcttcaacgacaccatccgggccaacattgcctacgggaaggaaggggaggccatggaatcagacatcgtgtctgccgcgcaactcgcgaatgcccacaagttcatcagctcgctccatcaggggtacgacacggtggtgggggagcgcggcgctcagctgtcgggagggcagaagcagcgggtggcgatcgcgcgggccgtggccaaggacccgaggatcctgctgctggacgaggcgacgagcgcgctggacgcggagtcggagcgggcggtgcaggacgcgctggaccgggtggcggcgagccggacgacggtggtggtggcgcaccgcctgtcgacggtgcggggcgccgacctgatcgcggtggtgaaggacggggcgatcgtcgagagggggacgcacgacgcgctcatcgccgtcaagggcggcgcgtacgcgtccctcgtcgccctccactccgcgtcggcggcgtcgtagcgccgctccaagaggggcgctcgcgaaattgtgggtggcgcggctggtaattattaccacgttcggctcaggtgtcagttcgctgtgaaaatgaaacccctatctctccgaatacctacgcaggcacgctttatatttcttgttagaaaggaacaagaaagttctataggaataacaaatatcc

SEQ ID NO: 4160 - DNA, 637 bp, Triticum aestivum
agaaggagccacgaatcgacatcgtatccccgcgcaactgcgacgcccacaagttcatcagctcactcccaacaggggtacggcacggtgtcggggagccggcgcgcagctgtcgggagggcagaagcagcgggtggcgatcgcgcgggcggtggccaaggaccccaggatcctgctgctggacgaggcgacgagcgcgctggacgcggagtcggagcgggcggtgcaggacgcgctggaccgggtggcggcgagccggacgacggtggtggtggcgcaccgcctgtcgacggtgcggggcgccgacgtgatcgcggtggtgaaggacggcgcgatcgtggagcggggcacgcacgaggccctgatcgccgtcaagggcggcgcgtacgcgtccctcgtcgccctccactccgcggcggcgccgtcgtcgtagcgccgctccaagaggggcgctcgcggaattgttgggggtggcacgcctggtaattattaccacgttcggttcaggtgtcagctcgctgtgaaaatgaaaccctatccgaagacctacgcacgaacgctttatatttctttgttagaaaaggaacaaaaaagttctatataggaataacaatacccaaatattatcttctatcaa

SEQ ID NO: 4161 - DNA, 638 bp, Triticum aestivum
ctccatactggtacctgctccgcacgagtggggttacgagcaataagatgcctcgccgcgccttcggcacacttggtgccgtggacatcgccggagacgaggtggctgccaacaagttgggcttgaagaagatggccacatatgtcatatatggcaccggtgctttctttgccggatgggttttgtccgctgttgtttcagcaattgactccatccccttgctcccaagaatactggagatggtgggcctcggatacacggtttggttcagctcacggtatcttcttttcaaggacaacagagaggaattgtttgccaaagcttatgatctcaaaatgagaattgttggatccggtgatgcatgatgtgttcacatatggttggacggctgagtgtaataacttctctctcgttttgggagaaatactaagttgtgtgtttcaaacatatgttactgagtttgtgatgtagtgtctgttatgtttgaactattcggagaaaaatgtatgtcgtgctttctagagaaaatgtggtgtatgtgataactggaataagcaagtaagacccatgtaggacatggctaggacaaataatcccaacattgccccttttatgcagagcaaacatgaaagcttatg

SEQ ID NO: 4162 - DNA, 831 bp, Triticum aestivum
aaagctgacgcaatggcggcttgttttgcatcagcacccccgccgccgccgcccttccccacctcccgcgcggacgcgcacccccgtgcgacgtcgcgctcgccgctccggttcctgcccgtctctccctccgccgccgcggcctcccaactacagggctgcgctgctccggcacggagttggggttacggatgcaataaggatggccgcggccacgccgttcgggcacaacctggtggcggtggacatcgtcggtgacgaggtggctgccgacaagctccagttgggcttcaaggagatggccacatatgtcatatatggcaccggtgctttctttgccggatgggttttgtccgctgttgtttcagcaattgactccatccccttgctcccaagaatactggagatggtgggcctcggatacacggtttggttcagctcacggtatcttcttttcaaggaaaacagagaggaattgtttgccaaaacttatgatctcaaaatgagaattgttggatccggcgatgcatgatgtgttcacatatggttgggcagctgagtgtaataacttctctctcgttttgggagaaatactaagttgtgtgtttcaaccatatgttactgagtttgtgatgtagtgttcgttatgtttgaactattcggcgaaaaatgtatgccgtgctttctagagaaaaatgtggtgtatgtgataactggaataagcaagtaagacccatgtaggacatggaggctaggccaaataatcccaacattgccccttttatgcagagcaaacatgaaacttatgggaggttggtatgatatggtgtc

SEQ ID NO: 4163 - DNA, 670 bp, Triticum aestivum
cccgtgcgcccgctcgacccgacgcgcgaccctgccgactgcgtccggaggacgccgggcaaggtgctggtgaacgtgaccgtgcagaggagcctgtggccgctgcacgtcatggcgtcggcggactggagcgtggcggaccttgtggccgccgccgtggggatttacgtgaaggagggcaggcggcccttgctgccggcgaccgacccgtcgaccttcggcctacactactcccagttcagcttggaaagtttggacccgagggagaaggtgatggagctagggtcccggagcttcttcctgtgccccaggtcctcctcggccgccgtccagacctcctcgtcctcctgctcctctgccggagcaagcggtgtcaggaagttgattaagttgtgcgaactcttacagtggtagactagcagatgtaggggaaagtaggtgtaacggtctaccctatcgtaaggtgctagcgcttctgaaagactatgtctcggtcatccgtcttctcaaacaccatgtagtgcgagaaaccaaacggaggcaatcgagtcttgtggggaaaagtgcgcaaacctctgcagagtgtataaactaatcatgattagctgtgtccccggttatggacatcttgagtatctagtacctggattatcatatgaatctcatcatg

SEQ ID NO: 4164 - DNA, 712 bp, Triticum aestivum
acgccgagcaaggtgctgtgtacgtgaccgtgcagaggagcctgtggccgctgcacgtcatggcgtcggcggagtggagcgtggcggacctcgtggccgcctccgtggggatctacgtcaaggagggcaggcggcccttgctgccggcgaccgacccgtcgaccttcggcctacactactcccagttcagcttggaaagtttggacccgagggagaaggtgatggagctagggtcccggagcttcttcctgtgccccaggtcctcttcggccgccgtccagacctcctcgtcctcctgctcctccgccggagcaagcggtgtcaggaacgccggggaggcgcctacgtcagcgggcgaaccgccggcctggctgcgctacatgccgttctggccgaccatgtagcgagcgggcacacttcatcatccatgatgatcactgcccaccctcggtccatgtctcgaattggtttggcacgcagagcttcaggggataagaccgtagcgtgctggtgcctgatagtatctcgttgtttaggcggaaacgtcatgatccactcggctcagccacgccagattcagatagtaggaaatatcaggtgcgtgattaggacagttcccgggaccgtgcccgggcaattaagattgttatagactacaggaagcatgatgtgtaattattgaattttgtatctgattatggatgcaagtaga

SEQ ID NO: 4165 - DNA, 1107 bp, Triticum aestivum
ggacagcctcgccgcccggctcccgtgcgccttgccgccggcagccgtgatccttgcgcccgccgtctgatcgcccgggtgtttggagctgtttctgcggcagcgcctgccggtcaccgccagcaagggcgatgcctcctcacgcgccttccttcgagaagagctgctccggcgaccggcaaaggcaggagtcaggagggcagctgctgcgaggcccggggcagcggtcggcgtcgttccacgggcgcggggcggagcagcggcaccagctgccaaagcagaggcccaagacgcagccggacctgctcgccggcgttaggggcaggagcttccgcgccgccgacggcggcgagccgctggcggagctggcggtccggaggacgccgagcaaggtgctggtgaacgtgaccgtgcagaggagcctgtggccgctgaacgtcatggcgtcggcggagtggagcgtggcggacctcgtggccgccgccgtggggatctacgtcaaggagggcaggcggcccttgctgccgtcgaccgacccggcgaccttcagcctacactactcccagttcagcttggaaagtttggacccgagggagaaggtgatggagctagggtcccggagcttcttcctgtgccccaggtcctcttcggccgccgtccagacctcctcatcttcctgctcctccgccggcgcaagcggtgtcaggaacgccggggaggctcctacgtcagcaggcgaaccgccggcctggctccggtacatgccgttctggccgaccatgtagcgagctagcacgtcatcatccatgatgatcactacccaccctcggtccatgtctcgaattggtttggcacgcagagcttcagaggataagaccgtagcgtgctggtgcctgatagtatctcattgtttaggcggaagcgtcatgatccacttggctcggccacgccagattcagatagtaggaaatgtcaggtgcttgactaggacagttcccgagaccgtgtccgggcaattaagattgttatagactacaggaagcatgatgtgtaattattgaattttgtatctgattatattgatgaaagtagaggagattgaccggc

SEQ ID NO: 4166 - DNA, 751 bp, Triticum aestivum
gggagaggcgcccccgcccaccgcggcagcaccgccggccccgtcgcccccgccgggtttgatcccatggcgtccaagaggatcctcaaggagctcaaggacctgcagaaggaccctcccacctcatgcagcgcaggtcctgtaggtgaggacatgttccactggcaggccactatcatgggaccctcggacagcccgttcaccggtggcctatttttggtgaacattcatttcccaccggattaccccttcaagcccccgaaggtctctttccgcaccaaggtgttccacccaaacatcaacagcaacggcagcatttgccttgacattctcaaggaacagtggagcccggctttgaccatatcaaaggtcctgctgtcaatctgttcgttgctgacggacccgaaccccgatgatcctctggtgcccgagatcgctcacatgtacaagactgatagggccaagtatgagtccacggcgcgctcctggacacagaagtacgccatgggctagagcttgacggccagctggtgaccatggatgcgccgagccagaaccgttatcacctaaataaccagccaaaagtatcaccccaccccgtgacgaagtgaatggacttttgaggccgtcgtgcccctgttgaactcgtatgaatgtactcttgccatgtcaagtccgttgggtctgggtagtctgttctacctgacgtttcgttatccgttaagttaaatctctgtcgtatctatgatat

SEQ ID NO: 4167 - DNA, 791 bp, Triticum aestivum
ccgccgcagaggggagaggcggccgccgcccgccgccacagcaccgccggccccgtcgcccccgcgcaccccgccgggtttgatcccatggcgtccaagaggatcctcaaggagctcaaggacctgcagaaggaccctcccacctcatgcagcgcaggtcctgtaggtgaggacatgttccactggcaggcaactatcatgggaccctctgacagtccgttcaccggtggtctatttttggtgaacattcatttcccaccggattaccccttcaagcccccgaaggtctctttccgcaccaaggtgttccacccaaacatcaacagcaacggcagcatttgccttgacattctcaaggaacagtggagcccggctttgaccatatcaaaggtcctcctgtcaatctgttcgttgctgacggaccccaaccctgatgatcccctggtgcctgagatcgctcacatgtacaagactgatcgggccaagtatgagtccacggcacgctcctggacacagaagtacgccatgggctagagcctggacggccagctggtgaccatggatgcgccgagcccagaaccgttatcacctaaataaccagccaaagtatcaccccaccctgcgacgaagtgaatggacttttgaggccgtcgtgcccctgttgaactcgtatgaatgtactcttgccatgtcaagtccgttgggtctgggtagtctgttctacctgacgtttcgttatccattaagttaaatctgtgtcgtatctatgatatgtgtggctatccattgca

SEQ ID NO: 4168 - DNA, 800 bp, Triticum aestivum
cctctctgcccgtgtcccaacgccgccgcggccgctgcagagggagaggccgccgccgccctgcgccgctccccgcgcccccgccggccgggtttgatcccatggcgtcccaagaggatcctcaaggagctcaaggacctgcagaaggaccctcccacctcgtgcagcgcaggtcctgtaggtgaggacatgttccactggcaggccactatcatgggaccctcggacagcccgttcaccggtggtctatttttggtgaacattcatttcccaccggattaccccttcaagcccccgaaggtctctttccgcaccaaggtgttccacccaaacatcaacagcaacggcagcatttgccttgacattctcaaggaacagtggagcccggctttgaccatatcaaaggtcctgctgtcaatctgttcgttgctgacggacccgaaccccgatgatcctctggtgcccgagatcgctcacatgtacaagactgatcgggccaagtatgagtccacggcgcgctcctggacgcagaagtacgccatgggctagagcctggacggccagctggtgaccatggatgcgccgagccccagaaccgttatcacctaaataaccagccaaagtatcaccccaccccgtgacgaagtgaatggacttttgaggccgtcgtgcccctgttgaactcgtatgaatgtactctttgccatgtcaagtccgttgggtctgggtagtctgttctacctgacgtttcgttatccattaagttaaatctctgtccgtatcatgatatgtatggcttt

SEQ ID NO: 4169 - DNA, 800 bp, Triticum aestivum
accaatgtacaccatgacatgggtttgctctctcgtaggttccatctcggtcatgagtgtgaaagctcttgggatagctttgaagctcaccttttccgtaacgaaccaactcatatatccacagacatgggcatttagtatggttgtcatctcatgcatcattactcaaatgaattacttgaacaaggcccttgacacgtttaatacggcagttgtctcccccatatattatacgatgttcacatctttaaccatcttggctagtgtgattatgttcaaggactgggaccggcaaaatccgacacaaatcgtgacagagatgtgtggcgtcgtcaccatcttctcgggaacatttctacttcacaaaacaaaggacatggctgatgggctttcgaactcttcttcattccgtcttccaaccatttcatcggcgcggtccttcaagcaaacagatgagtatagcgaaggggttcctctcagatcgtcggactcgttccggtcactgcattgatgcccggtcagccgcgctgaccatcgattttcaccgagctagggctcaggagcaagcttgtaatcaaatctgtctcgtgtgcgttgtatctcggctgtttcgtatgttctgggagcattgtggctgagccccaaggtatctaagtagcaggttgttagcatagcaccggagtgggagttgttctgtataatggatggatgggttatcaagcaggcagggtgctgaaattttaaccttgctgttgagatggtttcatccaatatggtagttgaaagtaaacttaaataca

SEQ ID NO: 4170 - DNA, 636 bp, Triticum aestivum
gggagagctacacgagtgttgtgtctgggataagaagccggccgccgagagcaaggtcgagaaggcggcggagaagaccccggcgggcaagaagcccaagaccgagaagcggtttccggcgggcaagacggcggccaaggagggcgccggcggcgagggcaagacgaggggccggaagaagggcggcaaggcgaagaagggcgtggagacgtacaagatctacatcttcaaggtgctgaagcaggtgcacccggacatcggcatctcctccaaggccatgtccatcatgaactccttcatcaacgacatcttcgagaagctcgccggggagtcggccaagctagcgaggtacaacaagaagcccaccgtcacctcccgggagatccagacctccgtccgcctcgtcctccccggcgagctcgccaagcacgccgtctccgagggcaccaaggccgtcaccaagttcacctcctcctagactgaatctgaatgcgtcgccttgttgttccaaatgtagtactagttggctgctgttgactctgcctgtctctctgcgagtagtggtagtggtagatgattgccaacgcttcgttggctccttggttgttagaggtgaacttgttgcttttgcaaact

SEQ ID NO: 4171 - DNA, 669 bp, Triticum aestivum
gtacgcgttgttatacttgcctatgcagattgagttcttgcaattccagcagtaccgttgaccatgtctgcaggtctattatttggtagtgttactggtactattatggtttcaatcagtgggacactagctgccgctgtggcctttctcatcgctagatactttgctagagagcgtattcttaagatggttgaaggaaacaagaagtttctggcaattgataaagcaataggtgaaaatggattcaaggttgtgactctgcttcgtttgagtcccctattacctttctcccttgggaactacttgtacggcttgacttcagtcaagttcctaccctacgtgttgggcagttggttgggtatgcttccaggaacatgggcttatgtcagtgctggtgcatttgggcgagctataattcaagatgagacggaaatcggtctgggaggaaacaaccagctattgacactgggcatagggctattagttacagccgttgctgctacttatgtaacacggctcgctaaggatgctgtaaaggatattgacgacgaatagaatggtaggattacatagcaaaagggccattcaaatagcaaagtagcacgagaatgtacatcactggcatcttttggtgcaatctaatctagaaatacagcgattgtcagagag

SEQ ID NO: 4172 - DNA, 684 bp, Triticum aestivum
ggttcattgaggctatggcactgctggtacgcgttgtttatacttgcctatgcaggattggaggttcttgcaattccagcagtaccgttgaccatgtctgcaggtctattattcggtagtgttactggtactattatggtttcaatcagtgggacactagctgccgctgtggcctttctcattgctagatactttgccagagagcgtattcttaagatggttgaaggaaacaagaagtttctggcgattgataaagcgataggtgaaaatggtttcaaggttgtgactctgcttcgcttgagtcccctattacctttctcccttgggaactacctgtacggtttgacttcagtcaagttcttaccctacgtgttgggcagttggttgggtatgcttccaggaacatgggcctatgtcagtgctggtgcatttgggcgagctataatccaagatgagacggaaatcggtttgggaggaaacaaccagctattgacactgggcatagggctattagttacagccgttgctgctacttatgtaacacggcttgctaaggatgctgtaaaggatattgacgacgaatagaatggtaggattacatagcaaaagggccattcaagtagcaacgtagcacgagaatgtacaacactggcatcttttggtgcaatctaatctagaaataca

SEQ ID NO: 4173 - DNA, 604 bp, Triticum aestivum
cgcgtccgctctactactccaccccagccaaacttcgaagaagcagcagtcgccgcaccatccatggcccccaaggctgccgagaagaagccggtggagaggacccccgcgggcaagaagcccaaggcggagaagaaggtgccggcgtccaaggagggtggcgacaagaaggggaagaagaaggccaagaagagtgtggagacgtacaagatctacatcttcaaggtgctcaagcaggttcaccccgacatcggcatctcctccaaggccatgtccatcatgaactccttcatcaacgacatcttcgagaagctcgctggcgagtccgccaagctcgcgaggtacaacaagaagcccaccatcacttcccgcgagatccagacctccgtccgcctcgtcctccccggcgagctcgccaagcacgccgtctccgagggcactaaggctgtcaccaagttcacctcgtcctaggctcctcctgcattagttctagtgtttatttcctctccctcgtctgatgaattctgtagctagctgtgtgtgttctgacagcgtcatcctgtaacaatggtgctgcctgaataaatagtcatgttgctgcttg

SEQ ID NO: 4174 - DNA, 720 bp, Triticum aestivum
cagatcccgaacacctgccggcggcgaagcaacccacccacccttctcgtccctcccgaagcagcgatggcccccaaggcggagaagaagccggcggcgaagaagcccgcggaggtaggagccctcggcggagaaggccgagaaggtccccggcgtgcgaagtaagcctcaaggccgagaagcggctgcctagccggcaagaccgcctcccaaggagggcggcgagaagaagggcaagaagaagagcaagaagagcgtcgagacctacaaaatctacatcttcaaggtgctgaagcaggtgcaccccgacatcggcatctcctccaaggccatgtccatcatgaactccttcatcaacgacatcttcgagaagctcgccggggaggcctccaagctcgcccgctacaacaagaagcccaccatcacctcccgggagatccagacctccgtccgcctcgtcctccccggggagctcgccaagcacgccgtctctgagggcaccaaggccgtcaccaagttcacctcctcttagattgcgtcgcctgtatctagtagcaaatgcagttccttcctgttggtttagtgcttgtctgtggactctggttatctgcaagtaatattagtcctactgttggatgaaaattgccgaatcattgccaatgcttttttggctcgtcggaaacaatgttgcgttgttggttctatatatactgatttccg

SEQ ID NO: 4175 - DNA, 694 bp, Triticum aestivum
agccaggtgcgcaccagctccggacgttcctccccaagtagcaggaccaagttgtggcgaggatagaggagaggatcgccgcctggaccatgctgccacaggagaacggcgagagcatcccaggtgctccggtacgagagcggccagaagtacgagccgcacgtcgacttcatccggcacactgccaagggataccattcccgcggggggcaccgcgtcgccaccgtgctcatgtacctgtccgacgtcaagatgggcgacgagaccgtcttccccaactccgacgccgagtcgttgcagcccaaagacgacactatggtcagagtgtgcacgaagtgggtacgcagtgaaacctgtgaagggcgacgcggtgctcttcttcagcctgcaccccaacgggacgacggacccggacagcctgcacgggagctgccccgtgatcgacggcgagaagtggtcggcgaccaagtggatccacgtccgacccttcgacagccgccctcgcgtgccgtccaccgccggatgcggggacgagaacgatctctgccctcggtgggctgccaatggcgagtgcgccaagaaccctcgctacatggtcggaacccccggcaaccccggcttctgccggaagagctgcaacgcgtgcaccggtacactgtagatttggaaattgtaatggcatgccactgactgg

SEQ ID NO: 4176 - DNA, 990 bp, Triticum aestivum
tcaaacgacccgaccgtctcgtcaccgcatcccatggctcccctgttccagcgcgccctcctcgccgccctgctgctcgccagcacggcctcctcatccttcgccaccgccagccgcgacgacggcggcgggcgcttcgaccccacccgcgccgtccacgtctcgtggcgccccagggcgttcctgtacaaggggttcctgtcggaggcggaatgcgatcacctcgtcgcgctggcggaggagggtggcctgcagaagtcgatggtggtggaccggctgacggggaagagcgtgatgagccaggtgcgcaccagctccggaacgttcctccccaagaagcaggaccaagttgtggcgatgatagaggagaggatcgccgcctggaccatgctgccacaggagaacggcgagagcatccaggtgctccggtacgagagcggccagaagtacgagccgcacgtcgacttcatccggcacacagccaaaggataccattcccgctgggggcaccgcgtcgccaccgtgctcatgtacctgtccggcgtcaagatgggcggcgagaccgtcttccccaactccgacgccgagacgttgcagcctaaagacgacacatggtcagagtgtgcacgacgtgggtacgcagtgaaacctgtgaagggcgacgcggtgctgttcttcagcctgcaccccaacgggacgacagacccggacagcctgcacgggagctgcccagtgatcgatggcgagaagtggtcggcgaccaagtggatccacgtccgacccttcgacagccgccctcgcgtgccgtccaccgccggatgcggcgacgagaacgatctctgccctcggtgggctgcaaatggggagtgcgccaagaaccctcgctacatggtcggaaccgccggcttccccggcttctgcaggaagagctgcaacgcgtgcaccagtacattgtagattactatattgtaatcgcaggccactgactgg

SEQ ID NO: 4177 - DNA, 784 bp, Triticum aestivum
  N_region (10)..(10): n = any nucleotide
  N_region (23)..(23): n = any nucleotide
  N_region (43)..(43): n = any nucleotide
  N_region (47)..(47): n = any nucleotide
  N_region (50)..(50): n = any nucleotide
cctcaagatngccaccggcggcnaaggccgtgggcgcattctngatntcngccggcgtcggcgtctggaacgccgtggtcttcgagatcgtcatgaccttcgggctcgtctacacggtgtacgccacggcggtcgaccccaagcgcggcgacctcggggtcatcgcgcccatcgccatcggcttcatcgtcggcgccaacatcctcgccggcggcgccttcgacggcgcctccatgaaccccgccgtctccttcggccccgctgtcgtcaccggcgtctgggagaaccactgggtgtactggctcggccccttcgccggcgccgccatcgccgccctcgtctacgacatctgcttcatcggccagcggccccacgagcagctccccaccgccgactactgaaaacctcactctcaatctcatccatccatcaccgccatgagagattgaaatcgattcaaaaaattccagcaagtgtacgtcgtcgtgtcatcatcagtaagccagtttagtttcattctctctccctctctctcacgtgtctttgagaaattcagggtaaacagtgtgagtcagtcagtcaggaataatctcttgtcttggtgtatgtcctcaattatgaatgcttctattccatggtcaagattgatgtttgtacaaaggtattgtctgtcctggcaacttgatgtcttgccaatcttgtgtccatattttctgtagattttgtcctgtcacgacatgatatgtatggtaagcattggtgattatgatggatgggaagagtt

SEQ ID NO: 4178 - DNA, 736 bp, Triticum aestivum
tggtgtactgggtggcgcagctgctcggctccgtcgtggcctgcctcctcctcaagatcgccaccggcggcgaggccgtgggcgccttctcgctctccgccggcgtcggcgtctggaacgccgtggtgttcgagatcgtcatgaccttcgggctcgtctacacggtgtacgccaccgcggtcgaccccaagcgcggcgacctcggggtgatcgcgcccatcgccatcggcttcatcgtcggcgccaacatcctcgccggcggcgccttcgacggcgcctccatgaaccccgccgtctccttcggccccgctgtcgtcagcggcgtctgggagaaccactgggtctactggctcggccccttcgccggcgccgccatcgccgccctcgtctacgacatctgcttcatcggccagcgcccccacgagcagctccccaccgccgactactgaaaacctcaatctcatctcgtccatccgtcatcgccatgagagattgaaatcgcttcaaaaattccagcaagtgtacgtcgtcgcgtcatcatcagtaagccagtttagtttcattgcgctatcttgtccttgagaaattcagggtaaacagtgtgtgcgagtcagtcagtcaggaataatctcatccttctcttatcttggtgtatgtatgtacgtcctcaattatgaatgcttctattccatggtcaagattgatgtttgcacaaatgtatttgtctctcctagca

SEQ ID NO: 4179 - DNA, 1051 bp, Triticum aestivum
gaaaaaaaagagtgcccgtcgaaaatgccggtgagcaggatcgccatcggcgccccgggggagctgtcccacccggacaccttccgcgccggcgtcgccgagttcatctccatgctcatcttcgtcttcgccggctcaggctccggcatggccttcggcaagctgactgacggcggcgcgacgacgccggcggggctgatcgcggcggcgctggcgcacgcgttcgcgctcttcgtggccgtctccgtgggcgccaacatctcgggcgggcacgtgaacccggccgtcacattcggcgccttcgtgggcggcaacatcagcctcctcaaggcggtggtgtactgggtggcgcagctgctcggctccgtcgtggcctgcctcctcctcaagatcgccaccggcggcgaggccgtgggcgccttctcgctctccgccggcgtcggcgtctggaacgccgtggtcttcgagatcgtcatgaccttcggcctcgtctacaccgtctacgccaccgccgtcgaccccaagcgcggcgacctcggggtcatcgcgcccatcgccatcggcttcatcgtcggcgccaacatcctcgccggcggcgccttcgacggcgcctccatgaaccccgccgtctccttcggccccgccgtggtcagcggcgtctgggagaaccactgggtctactggctcggcccctttgccggcgccgccatcgccgccctcgtctacgacatctgcttcatcggccagcgcccacacgagcagctccccaccgccgactactgaaaatatcaatccgaatcccatccatcagtcatcgccatgagagactgaaattgcttcaagaatcaagcaggtgttatcgtgtcatcagcaagcccgtttagtttcatcgtctctctctcttgtctttgagaaattcagggtaaacagtgagtcagtcagtcagtcaggaataatctcttgtcttggtgtacgtacgtcctcaattatgaatgcttctattccatggtcatgattgatgtttgtacaaatgtattgtctctcctagcaa

SEQ ID NO: 4180 - DNA, 607 bp, Triticum aestivum
agtggagataaggaggctacttttccttaaagacacctatggcaatggtggcatggaaagcaaaagtcgtggctggtagcccgaacacttctctggtttcaagtgccaggaagttgcaacgtgagagggagatgctctgcaggcaaatgcagaagcggctctcgatcgaggaaagagagagcatgtacaccaaatggggagtttcgctgtcctccaagaggagaaggcttcaggtggcacgtcgcctttggaccgaaaccaaaaacctcgagcatgtcagggagagcgcttcccttgtcgcccgattgatcggcctcctggagccaggaaaggcgctgagggagatgtttgggctaagcttcgcgccgcagcagttcagccgacgatcccacaatagctggagatatggccgttcttctctggactgattacgacatgcaaatgaacacaggaggttcccttgtcctcccccacccccacctcacctcgccttggtgggtatagaattataggagcattgttagttatagcctgtaggccctttgatgtgtgtatgatactgtaatgcgttcagaagctctgtctactgctctgggtgatcaaacat

SEQ ID NO: 4181 - DNA, 667 bp, Triticum aestivum
ttttcttgttgtttaaaggagatccagccgactccatttacatggaagtggagataactaaggctatctttccttaaagatacctatgccaatggtggtatggaaagcaaagtcgtggctggtagcctgaacacttctctggtttcaagtgccaggaagttgcaacgtgagagggagatgctctgcaggcaaatgcagaagcggctctcgattgaggaaagagagagcatgtacaccaaatggggagtttcgctgtcctccaagaggagaaggcttcaggtggcacgtcgcctttggaccgaaaccaaaaacctcgagcatgtcagggagagcgcttcccttgtcgcccgattgatcggcctcctagagccaggaaaggcactgagggagatgtttgggctaagctttgcgccacagcagttcagccgacgatcccacaatagctggagatatggccgttcttctctggactgattgcgacatgcgaatgaacacgaggttttcattgttcccttgttggatatatagaattatataggagcatagcattggcggttgtagcttatataggcccttcagtgtgttttctgtatgatattgtaaaatgcatcgaccctactcaatcttacaccatcaagttcgattgggaagctctgtctacagaact

SEQ ID NO: 4182 - DNA, 826 bp, Triticum aestivum
ttcgagttcatcgccgacgagaggagcagccacacgggaagcagcagtagcagcaacgctgccggccccgggatgtcttccggtctaaagactgtgtgtggactgtggactagctaccacatcctcatgtactcctaccatgaagtaataagttgtgccctcctcaaaagtttcggacgcgtggggccgccagcaccaccgctcctcctccacctcgatccaaatcacacatcagctcaaaggaaggaagccgtcagccatgtccggccgcggcaagggagggaagggcctcggcaagggcggcgccaagcgccaccggaaggtgctgcgcgacaacatccagggcatcaccaagccggcgatccgccgtctggcgcggcggggcggcgtgaagcgcatctcggggctcatctacgaggagacccgcggcgtgctcaagatcttcctggagaacgtcatccgcgacgccgtcacctacaccgagcacgcccgccgcaagaccgtcaccgccatggacgtcgtatacgcgctcaagcgacagggccgcaccctctacgggttcggcggctaggccgcgccggtccgggcaagaaggacccgtctcgcaccaccggatttgtgctagtagctacgcgttgtctgatggtggtgttcatgtcctcggtgtaatggccgcatctcgctgctgtttgccctggatttgtttgttgtttggatgtactaggatggaatggaaatcgcagcattttacccctgaattcgtacgtaatctgtgggtctgtcgatgtttgttggtgcttgtggtcacatattaccagtgcgttaa

SEQ ID NO: 4183 - DNA, 804 bp, Triticum aestivum
cttcctcccagtcccattccacagccatgtccgggcgcggcaagggaggcaagggtctcggcaagggcggcgccaagcgccacaggaaggttctgcgcgacaacatccagggcatcaccaagccggcgatccggcgcctggcgcggaggggcggcgtgaagcgcatctccggcctcatctacgaggagacccgcggcgtgctcaagatcttcctcgagaacgtcatccgcgacgccgtcacctacaccgagcacgcccgccgcaagaccgtcaccgccatggacgtcgtctacgcgctcaagcgccagggccgcaccctctacggcttcggcggctagggccgtccggccgacggtcgtcgctcgttgtcgccgcctgcagattccaaaagcctgatgagaccctgacttgtttagttcgctatttcctctgtagctcgaactgaatcgtggaccaaagttattcgcatgtgttgttggaaatgaaacctgtctctgttgtgataccgtgtttctgattttgtctcgctggtcggtctctgttattgaagcggcaacgagttgatttgccataatttaccaggagccccggatgagtcgtagtactacttgtttgcagtctattttgtaatgccatagtgactgaacaattgtgtgtcccgattcagcaacatcatttgctcaccattgatgttacttctgtggtaattgagattggggttagtctgcatttcatacattgagttctggattgagttgctgtccttggcgagagttctgggcgtacgaatttgctctcttgtaa

SEQ ID NO: 4184 - DNA, 596 bp, Triticum aestivum
  N_region (69)..(69): n = any nucleotide
tgttaatcaagaaatgtgttcaggtatgcgatcacccacatcccttgcatgtcaagagtatggtgaaanatgtactcgatgggaagtttgatgaggcctgctctggcctaaagcaactctatgatttgggctactctcctactgacatcatcactaccctcttccgtgtcatcaagaactatgacatggctgaatatctgaagctggaactgctgaaggaaacgggatttgcgcacatgaggatctgtgatggcgttgggtcattccttcagctttctggccttctggccaaatttgctctggtgagagaaacagcaaaggcctaacgctgtgcagctgctctgacaccagttaacagtgttgtcatgcatagcctattttatcgctcctctgtcgtggtatctcagtgtgtaagatagttctttgctgaagtgaactatttatgcttgtttagcatcggagatgtagttgtagcctgtagtgactagtgaggagactgagtcctcgtagttcgagtactgctgtatttcggaactaatctgggtatttttcgggtcttttgtagtctattgagctgtcgtaccaccatcatgaag

SEQ ID NO: 4185 - DNA, 653 bp, Triticum aestivum
tctgaaccataattttactgctgatgtgacatgagcaagcttgaacatttgcaagctacatcattggtttcgttttgttaatcaagaaaatgtgttcaaggtatgtgatcaaccacatcccttgcatgtcaagagtatggtgaaaaatgtactcgatgggaagtttgacgaggcctgctctggcctaaagcaactctatgatttgggctactctcctaccgacataatcaccactctcttccgtgtcatcaagaactatgacatggctgaatttctgaagctggaattgctgaaggagacaggatttgcgcacatgaggatctgtgcagctgctctgacatcagttaacagtgttgtgatgcgtatcgtgtttatcacgactctgtcttggtatctcagtgtgtaagatagttcttcgctgaagtgaactatttatgtttgtttagcgtcggagatgtagttgtagcctgtagtgactagtgaggagactgagtcctcgtagttcgagtgcttttggcccagccatccgtgcttcacgcgctgctgtatttcggaactaatctgggtatttttcgggtcttttgtagtctattgagctgtcgtaccagcatcatgaaggaaccgtcagttatcccaagtcaactgcatatcaa

SEQ ID NO: 4186 - DNA, 657 bp, Triticum aestivum
aaatgtgttcaaggtatgtgatcaccacatcctgcatgtcaagagtatggtgaaaaatgtactcgatgggaagtttgacgaggcctgctctggcctaaagcactctatgatttgggctactctcctaccgacataatcaccactctcttccgtgtcatcaagaactatgacatggctgaatttctgaagctggaattgctgaaggagacaggatttgcgcacatgaggatctgtgatggcgttgggtcattccttcagctttccggcctactggccaagtttgctctggtgagggaaacagccaaagcgtaacgctgtgcagctgctctgacatcagttaacagtgttgtgatgcgtatcgtgtttatcacgactctgtcttggtatctcagtgtgtaagatagttcttcgctgaagtgaactatttatgtttgtttagcgtcggagatgtagttgtagcctgtagtgactagtgaggagactgagtcctcgtagttcgagtgcttttggcccagccatccgtgcttcacgcgctgctgtatttcggaactaatctgggtatttttcgggtcttttgtagtctattgagctgtcgtaccagcatcatgaaggaaccgtcagttatccaagtcaactgcatatcaattatggattggc

SEQ ID NO: 4187 - DNA, 605 bp, Triticum aestivum
gtgactcgcaaaccctagctcgcgagcacagggccacaaaaccacacccctctccctgcccgccgccacttgccgcaactcctccaccagaaagggaagcacgccggagtcccatctccccggccgtcaaaatggtgaatgttccgaagaccaagaagacctactgcaaaaacaaggagtgcaagaagcacacacttcataaggtcactcagtacaagaagggtaaggacagtctgtctgcccagggaaagcgtcgttatgacaggaagcagtcgggatatggtggtcagaccaagcctgttttccacaagaaggcaaaaaccacaaagaagattgtgctgaagctgcaatgccagagctgcaagcactactcccagcgtgccatcaagaggtgcaagcattttgagatcggtggagacaagaagggcaaggggacatctcttttctagactgctttcacctatctggagtggtggtggtcaagaagtattactacttgtgttaagagtttgttgttaggagttaaattaatcagaccttgtcatgtatccaaactcctgtgtctcgcatttaagcaagaggcgacttttggctaagtgaagttt

SEQ ID NO: 4188 - DNA, 547 bp, Triticum aestivum
gggaagggaagcacgccggagccccatctccccggccgtcaaaatggtgaacgttccgaagaccaagaagacctactgcaaaaacaaggagtgcaagaagcacacacttcacaaggtcactcagtacaagaagggcaaggacagtctatctgcccagggaaagcgtcgttatgacaggaagcagtcgggatatggtggtcagaccaagcctgttttccacaagaaggcaaaaaccaccaagaagattgtgctgaagctgcaatgccagagctgcaagcactactcccagcgtgccatcaagaggtgcaagcattttgagatcggcggagacaagaagggcaaggggacatctcttttctagactgctttcacctatctggagtggtggtggtcacgaagtattactacttgtgttaagggttcgttgttaggagttaaattaatcagaccttgtcatgtatccaaactcctgtgtcttgcatttaagcaagaggcgagttttggctaagtgaagttttgtagcttgaatcctctttcattccgtata

SEQ ID NO: 4189 - DNA, 471 bp, Triticum aestivum
cgccccaccgtctccacccaattccatctgctcggagctccaagccgccatcatgtccggccgcggcaagggcgggaagggcctgggcaagggcggcgccaagcgccaccggaaggtgctgcgggacaacatccagggcatcacgaagccggcgatccggcgtctggctcgcaggggcggcgtgaagcgcatctcggggctcatctacgaggagacccgcggcgtgctcaagatcttcctggagaacgtcatccgcgacgccgtcacctacaccgagcacgcccgccgcaagaccgtcaccgccatggacgtcgtctacgcgctcaagcggcaggggcgcaccctctacggcttcggcggctgatctgctgctgctgctccgtccagtctctgccagctcctgttccatctgagtgtgcgtgttgctccgtcgttctgtgtagtagtggatgccatgagtatggatgcaat

SEQ ID NO: 4190 - DNA, 679 bp, Triticum aestivum
tgcatgcggcgcgggtgcatgtgccagaggaagatggatctggagagtcacgaattggattaaaactggcatgccttatagtatataccctaaataacaagggcatgcgttgtgtcgtgtgttatattgtgtctttgtgttgatccaattcgggctccaccccctcccagcgagaaatccccaattccttcgtcttcttcctcgcgagacgcacacagcagagcagagagcgagaagatgtccgggcgcggcaagggcggcaaggggctgggcaagggcggggcgaagcggcacaggaaggtgctgcgggacaacatccaggggatcaccaagccggcgatccggcggctagcgcggaggggcggggtgaagcgcatctccgggctcatctacgaggagactcgcggcgtgctcaagatcttcctcgagaacgtcatccgcgacgcagtcacctacaccgagcacgcgcgccgcaagaccgtcaccgccatggacgtcgtgtacgcgctcaagcgccagggccgcaccctgtacggcttcggcggttaggcgatagctagctaggcttcaatgtgtctatcaggtcgctggtctgcgaatgcttgtgcctgtggtttgatttaatgcttgttatagaggaaatgctgcctggatgtgtttctctacacctataggcagt

SEQ ID NO: 4191 - DNA, 689 bp, Triticum aestivum
tacctttcccttcgagcaaactcacacaacccacaccaccgcagcccccaaccccacccgaagcagcagccatgggcccccaaggcagacaagaagccggcggccgagaacaaggtcgagaaggcggcggagaagacccccgcggggaagaagcccaaggccgagaagcggctgccggcgggcaagacggcgtccaaggaggccggcggcgaggccaagacccggggcaggaagaagggcagcaaggccaagaagggcgtggagacgtacaagatctacatcttcaaggtgctgaagcaggtgcaccccgacatcggcatctcctccaaggccatgtccatcatgaactccttcatcaacgacatcttcgagaagctcgccggcgagtcggccaagctcgcgaggtacaacaagaagcccaccatcacctccagggagatccagacctccgtccgcctcgtcctccccggggagctcgccaagcacgccgtctccgagggcaccaaggccgtcaccaagttcacctcctcctagactgacggcgtgcagttggtttctgcatctgcatctgtactgttgactctgcttatctatctatccgcaagtagtggtagcagtagtagcacctgtgctgggtgattgccaacgctttgttggcccgttggttgtaagaactgaagttgctgctt

SEQ ID NO: 4192 - DNA, 730 bp, Triticum aestivum
ccctgcctctctccagcaactacgcccctccaccaccgaagctccctaccccacccgaagcggcagccatggcccccaaggcagacaagaagccggcggccgagagcaaggtggagaaggcggccgagaagacccccgcggggcaagaagcccaaggccgagaagcggctgccggcgggcaagacggcgtccaaggaggccggcggtgagggcaagacccggggccgcaagaagggcagcaaggcgaagaagggcgtggagacgtacaagatctacatcttcaaagtgctgaagcaggtgcaccccgacatcggcatctcctccaaggccatgtccatcatgaactccttcatcaacgacatcttcgagaagctcgccggggagtcggccaagctcgcccgctacaacaagaagcccaccatcacgtcccgggagatccagacctccgtccgcctcgtcctccccggggagctcgccaagcacgccgtctccgagggcaccaaggccgtcaccaagttcacctcctcctagactgacgacgcgccgcttgttgtgacagatgtggccgtctgctgtatctgtagtcgctgttgactctgcttatctccatctgcaagtagtggtagctgtagtgcgcgtgctgggtgatgattgccaacgctttgttggctggttggatgtaagaactgaacgtgttgcttttgcaactgatgaaatctatctagaaaat

SEQ ID NO: 4193 - DNA, 857 bp, Triticum aestivum
gtgatgatgatgtagaaaaaataaaaggatttcctatggaaacaagtatatcatttcgggaacggctgaagatacttggacgggtggctaatctggaggaccttcctttaagtgccgcggagaggaagctaatgcatgcatacaacgagaagcctgtgctttctagacctcagcatcagtttttcctgggtgataactactttgaggttgacattgacatgcatagatttggctacatctcaaggaaaggtttcgagacattcctggacaggctaaaaatatgcatgctagatgttgggctaaccatccagggaaacaaacccgaagaattgcctgagcaggtcttgtgctgtgttaggttgaacgggatagattatgcaaagtatcagccactgatgacaaacggtgcctgaacttggtgacttgcaaggaccagctaaccattgtttgtttgggatctgggaggtggcctgatcatgccaaggcgcggcggcgaggcccctcgaggtttccggccaggaaaccggaggcggactctcctcgtcggttcaccgccgtgagaagctagcgcgagcggctgcatgtaaaatctgtatatcgttacatgagctctgactgcctctgctgctgttgttgctgcccgtgattctggagctagtaaatatggctaatttgcccgtggaatggtaggtttcgatgcgccgcctcgacgagaaataggttcggtcgggcgcacctggaacatgaggaggacctgtggtgaacgcgagctgcttgcgatggtgtggaatgttgagcaccggaggcgttgtgtaagtgtaacccataccctcacatgacctcacatgagacgaaaa

SEQ ID NO: 4194 - DNA, 702 bp, Triticum aestivum
tgtgctttctagacctcagcatcagtttttcctgggtgataactactttgaggttgacattgacatgcatagatttggctacatctcaaggaaaggtttcgagacattcctggacaggctaaaaatatgcatgctagatgttgggctaaccatccagggaaacaaacccgaagaactacctgagcaggtcttgtgctgtgttaggttgaacgggatagattatgcaaagtatcagccactgatgacaaacggtgcctgaacttggtgacttgcaaggaccagctaaccattgtttgtttgggatctgggaggtggcctgatgatgccaaggcgcggcggcggcgaggcccctcgaggtttccggccaggaaactggaggcggactcctcgtcggttcaccgccgtgagaagcgcgagcggctgcatgtaaatctgtatatcgttacatgagctctgactgcctctgctgctgttgttgctgcccgtgattctggagctagtaaatatggctaatttgcccgtggaatggtaggtttcgatgcgccgcctcgacgagaaataggttccgtcagacgcacccggaacatgaggaggatctgcggtgaacgcgagctgcttgcaatggtgtgggatgtgagcaccggaggcgttgtataagtgtaacccatacctcacatgacctcacatgagacgaaaaataat

SEQ ID NO: 4195 - DNA, 896 bp, Triticum aestivum
ctcaaaagagctttcacccttattcatagagaatatcagaaggttggttgatgatgatgtagaaaaaataaaaggatttcctatggaaacaagtatatcatttcgggaacggctgaagatacttggacgggtggctaatctggaggaccttcctttaagtgccgcagagaggaagctaatgcatgcatacaacgagaagcctgtgctttctagacctcagcatcaatttttcctgggtgataactactttgaggttgacattgacatgcatagatttggctacatctcaaggaaaggtttcgagacattcctggacaggctaaaaatatgcatgctagatgttgggctaaccatccagggaaacaaacccgaagaactgcctgagcaggtcttgtgctgtgttaggttgaacgggatagattatgcaaagtatcagccactgatgacaaatggtgcctgaacttggtgacttgcaaggaccagctaaccattgtttgtttgggatctgggaggtggcctgatcatgccaaggcgcggcgaggcccctcgaggtttccggccaggaaaccggaggcgggctcgtcggtcaccgccgtaacaagcgcgagcggctgcatgtaaatctgtacatcattacatgagctctgactgcctctgctgttgttgctgcccgtgattctggagctagtaaatatggctagtttgcccgtggaatggtaggtttcgatgcgctgcctcgacaaaaaataggttcggtcgggcgcacctggaacatgaggaggatttgtggtgaacgcgagctgcttgcaatggtgtggaatgtcaacaccggaggcgttgtataagtgtaacccatacctcacatgacctcacatgagacgaaaaataatggagca

SEQ ID NO: 4196 - DNA, 735 bp, Triticum aestivum
gccccccgccctcgtctttctcatgcatggggcggcctacgggacgcccagacgcgtcgggtggcgtccatgggagtcatgcggccggagcttgtcatgaagtccatcgtgcccgtcgtcatggcgggagtgctcggaatctacggcctcatcatcgccgtcatcatcagcaccgggatcaaccccaaggccaagccctacttcctcttcgacggctacgctcacctctcctccgggctcgcctgtggcctcgcggggctcgccgccggcatggccattggcattgtcggtgatgctggagtcagggctaatgcgcaacaaccaaagctgttcgtgggcatgatccttatcctcattttcgcagaagcacttgccctttatggtctcatcgtgggcatcatcctctcgtcccgtgccggccagtcccgtgcggattaggcgcctcgctctaccattctgcaattgccacacaggctacattcttgagaagctgaagcattgaaaagttctaattttgatgtattaaggagatatttgtagatttttaaggaaggtgacacttccagtaccgttttcattctttttgggttgtggtgggcgtttgctgttcgtgcagaggattttggggtaggctggattgctgctcctgggaatatgggttttaatcctactggtggtgaataaaaacacgcattgtagctaaataataaatttatgattatattatgttcatct

SEQ ID NO: 4197 - DNA, 937 bp, Triticum aestivum
ggcgaggagaggagaggagaaaatagaagcaaactggagaggccctctgttcctctccctagcaaccatcttccttagcgacgaggccaccccgagttccacaggaaagaagcgcgaccggaggaggaagaagaggagcaagatgtcgtcggtgttcagcggcgatgagacggcgcccttcttcggcttcctcggcgccgccgccgcgctcgtcttctcatgcatgggggcggcctacgggacgtccaagagcggggtcggggtggcgtccatgggggtcatgcggccagagctcgtcatgaagtccatcgtgcccgtcgtcatggcgggtgtgctcggaatctacggcctcatcatcgccgtcatcatcagcaccgggatcaaccccaaggccaagccctacttcctcttcgacggctacgctcacctctcctccgggctcgcctgtggcctcgcggggctcgccgccggcatggccattggcattgtcggtgatgctggagtcagggctaacgcgcaacaaccaaagctgttcgtgggtatgatccttatcctcattttcgcagaagcacttgccctttacggtctcatcgtgggcatcatcctgtcgtcccgtgccggccagtcccgtgcggattaggcgcctcgctctaccattctgcaattgccacacaggctacattcttgagaagctgaagcattgaaaagttctaattttgatgtattaaggagatatttgtagattattaaggaaggtgacacttccagtaccgttttcgttctttttgggttgtggtgggcgtttgctgttcgtgcagaggattttggggtaggctggattgctgctcctggttatatgggttttaatcctactggtggtgaataaaaacacgcattgtagctaaataataaatttatgattatattatgttcatct

SEQ ID NO: 4198 - DNA, 765 bp, Triticum aestivum
tcttccttagcgacgaggccacccagagttccacaggaaagaagcgcgaccggagaaagaagaagaagagcaagatgtcgtcggtgttcagcggcgatgagacggcgcccttcttcggcttcctcggcgccgccgccgccctcgtcttctcatgcatgggggcggcctacgggacggccaagagcggcgtcggggtggcgtccatgggagtcatgcggccggagctcgtcatgaagtccatcgtgcccgtcgtcatggcgggagtgctcggaatctacggcctcatcatcgccgtcatcatcagcaccgggatcaaccccaaggccaagccctacttcctcttcgacggctacgctcacctctcatcagggctcgcctgtggcctcgcggggctcgccgccggcatggccattggcattgtcggtgatgctggagtcagggctaatgcgcaacaaccaaagctgttcgtgggcatgatccttatcctcattttcgcagaagcacttgccctttacggtctcatcgtgggcatcatcctctcgtcccgtgccggccagtccgtgcggattaggcgcctcggtctaccattcttgcattgcacacagggtacatcttgagaaggttctaatttggagtatcacgcgacttgcccatataaccgggggaacttcaggacgcggccaccctcgggggcggggggcgcggccgccagaatgggggacgaggggcccgcgagggggaacacccggggaaaagcgcgggata

SEQ ID NO: 4199 - DNA, 572 bp, Triticum aestivum
gcgttcctggggcagaatcccactgaggcagagcttcaagacatgatcaatgaggtggatgctgacggcaatggaacaattgatttccccgaattcctcaaccttatggcccgcaagatgaaggacactgattctgaggaagagctcaaggaggcattccgtgtgtttgacaaggatcaaaatggttttatctctgctgctgaactgcgccatgtcatgaccaaccttggtgagaagttgactgatgaggaggttgacgagatggtccgtgaggctgatgttgatggtgatggccagatcaactatgacgaatttgttaaagtcatgatggccaagtaagttgcattaccatctgagggaagcttcagtaatcagaccaaaatattacctatccaggtgccattttgtgggatggctattgtattaaaccgaaaacgataacactgctgtgtcatatgttgtaggcaatgattgtttgccttgaagattttatagatcctgctctggtctttctgattttgtctgttccgtttttttatgtttggttcgtttcaacttttcaagcgtgtagc

SEQ ID NO: 4200 - DNA, 780 bp, Triticum aestivum
ttcccggtcgaccaagcgtcgcgccattccgacccgactgcggccaatgcggacctagctcaccgacgaccagatcgccgagttcaaggaggctttcagcctcttcgacaaggatggggacggttgcattaccaccaaggagctgggaactgtcatgcgttccctggggcagaatcccactgaggcagagcttcaagacatgatcaatgaggtggatgctgacggcaatggaacaattgatttccctgaattcctcaaccttatggcccgcaagatgaaggacactgattctgaggaagagctcaaggaggcattccgtgtgtttgacaaggatcaaaatggttttatctctgctgctgaactgcgccatgtcatgaccaaccttggtgagaagttgactgatgaggaggttgacgagatggtccgtgaggctgatgttgatggtgatggccagatcaactatgacgaatttgttaaagtcatgatggccaagtaagttgcattaccatctgagggaagcttgagtaatcagaccacaatattacctatccaggtgccattttgtgggatggctattgtattaaaccgaaaacaatataacactgtgctgtgtcatatgttgtaggcaatgattgtttgccttgaagattttatagatcctgctctggtctttctgattttgtctgttccgtttttttatgtttggttcgtcaacttttcaagagtgtagccacaatctgttaatgaataactatatgtcagtgttccatgattacccct

SEQ ID NO: 4201 - DNA, 657 bp, Triticum aestivum
gccaccaccgttcctccgattccaccacatccgctcgcagctcgagatcgtgagccatgtccgggcgcggcaagggaggcaaggggctgggcaagggcggcgccaagcgccaccggaaggtgctgcgcgacaacatccagggcatcaccaagccggcgatccggcggctggcgcggaggggcggcgtgaagcgcatctcggggctcatctacgaggagacccgcggcgtgctcaagatcttcctcgagaacgtcatccgcgacgccgtcacctacaccgagcacgcccgccgcaagaccgtcaccgccatggacgtcgtctacgcgctcaagcgccagggccgcaccctctacggattcggcggctaggtcctgccgactgtcgcctgtctctgtcgccgcctgcagatccgcaaagcttgatggaactctgactttttcagttcgctgtttactctatctgtgtagttcgaactgaatcgtggaacaaagttatttgcatatcttgttggaaatgaaacttgcctctgtcagcatgtcgtaaatctgattctgttcgctattgggtacgattgttgtttcccttgtgatgcttgggccccggatgaatcgaacttgtttgcaggctaatttgtaatgtgatgaaaaaacgccatta

SEQ ID NO: 4202 - DNA, 681 bp, Triticum aestivum
tccgattccaccacatccgctcgcagctcgagatcgtcagccatgtccgggcgcggcaagggaggcaaggggctcggcaagggcggtgccaagcgccacaggaaggttctgcgcgacaacatccagggcatcaccaagccggcgatccggcggctggcgcggcgcggcggcgtgaagcgcatctcggggctcatctacgaggagacccgcggcgtgctcaagatcttcctcgagaacgtcatccgcgacgccgtcacctacaccgagcacgcccgccgcaagaccgtcaccgccatggacgtcgtctacgcgctcaagcgccagggccgcaccctctatggcttcggcggctaggccaccaccggatagtcgttgtttggtacagtactagcagtgttcgtggtcctcgggtctgaaaaatcgccgcatctcgctgctgtttgccctggccctgtttgttgtctggatgtactaggatggaatggaaattgcagcagtttacccttgaattcgtccctgatatgtggatctgttgatgtttgttcatgcgcgtggtctgatattaccagtgcgttcttcagttgtcttgctctgtaaatttcagcctccaaatcagcttcggatttggatcctactctgtgttggcttcagtgttggactcaacaaatcctattatgtgtt

SEQ ID NO: 4203 - DNA, 883 bp, Triticum aestivum
gtagccaccgccgttcctccggttccacatcccgctcgcagctcgagatcggcagccatgtccgggcgtggcaagggaggcaaggggctcggcaagggcggcgccaagcgccacaggaaggttctgcgcgacaacatccagggcatcaccaagccggcgatccggcggctggcgcggaggggcggcgtgaagcgcatctcggggctcatctacgaggagacccgcggcgtgctcaagatcttcctcgagaacgtcatccgcgacgccgtcacctacaccgagcacgcccgccgcaagaccgtcaccgccatggacgtcgtctacgcgctcaagcgccaggggcgcaccctctacggcttcggcggctaggcccggccgacggtcgcatgtctctctcgccgcctgcagattcgaaaagcttgatggaaccccgacctgtctagttcgctgtttcctgtgtagctcgcatgtgtttgttggaaatcaaacttctctctgcaaatgccgcgtttctgaatttgtttcgccgtttggtctctgttgggtcgatattgaggtggcgatgagttgatttgccataatttaccaggagccccggattagccgtacttgtttgcagtctaatttgatgttacttctgtggtgcaatgtgtgaaaatggagatggtgatttgtctgcatttcatactacatcgagttgtagattgagtttctatccttgaccggacttcctggtgtacaaatttgttgcctgacttgtactgtgaaactatctcagtgaccaattcatcatgtggttcgtgctaactgctagtgctataagttaattaggatcatcatttgtgcttttatttctgttgatttgtatgtagttactacaata

SEQ ID NO: 4204 - DNA, 590 bp, Triticum aestivum
  N_region (7)..(7): n = any nucleotide
  N_region (106)..(106): n = any nucleotide
gcagctngctgggcagatcgtgaagatgagccaacaaaaatttgcttccaacgttgttgagaagtgtctgtcttttggttctcctgaggagcgccagattctaatnaatgaaatgcttggcactactgacgagaatgagccattacaggcaatgatgaaagaccagtttgcaaactatgtagtgcagaaggttttggagacttgcgacgaccacaaccgtgagctgattctttcgcgtatcaaggtccacctgaacgcactgaagagatacacctacgggaaacatattgttgcccgtgtggagaagcttatagccgcaggagaaaggcgtatcggggtctcgtcgcagtcttgcagagattgaatggttagtttgacagaataacccctgtacagacagatagcgaggctagccttaccagtagtcgttgtccagtgccgtcgtcggagaagttggagctcaagaaagcctttgattgtaaataaaggagggggcctctgggaataaagaaagagaaagagaagagattttgcttgttcaaaaggagagaagttgtatatttgtacctttttccctcttcgagtaagat

SEQ ID NO: 4205 - DNA, 702 bp, Triticum aestivum
tctactactccaccccagccaaacttctctctcgccttcgaagaagcagcagccgccgccgtagcatccatggcacccaaggctgctgagaagaagcctgtggagaagacccccgcgggcaagaagcccaaggcggagaagaaggtgccggcgtccaaggagggcggcgacaagaaggggaagaagaaggccaagaagagcgtcgagacgtacaagatctacatcttcaaggtgctcaagcaggtgcacccggacatcggcatctcctccaaggccatgtccatcatgaactccttcatcaacgacatcttcgagaagcttgccggcgagtctgccaagctcgccaggtacaacaagaagcccaccatcacgtcccgggagatccagacctccgtccgcctcgtcctccccggcgagctcgccaagcacgccgtctccgagggcaccaaggccgtcaccaagttcacctcgtcctaggctcctcgtgcattagttcttgtgtttctttcctcttcgttgtctgatgaattctgtagctagctgtgtgtgttctgacagcgtcatactgtaacaatggtgctgcctgaataaatagtcatgttgctgcttgaatggacgactgtcgccttggattcagtttcatctcgggctaagagctgggaagatggtttcttatctctgaaagttttgcacagatgcttg

SEQ ID NO: 4206 - DNA, 573 bp, Triticum aestivum
tccagcccagccaaacttttctcaccttcgaagaagaagcagcagcatccatggcccccaaggctgctgagaagaagccagtggagaagacccccgcgggcaagaagcccaaggcggagaagaaggtgccggcgtccaaggagggcggcgacaagaaggggaagaagaaggccaagaaaagcgtggagacgtacaagatctacatcttcaaggtgctcaagcaggtgcaccccgacatcggcatctcctccaaggccatgtccatcatgaactccttcatcaacgacatctttgagaagctcgccggtgagtccgccaagctcgcgcgctacaacaagaagcccaccatcacgtcccgcgagatccagacctccgtccgcctcgtcctccctggcgagctcgccaagcacgccgtctccgagggcaccaaggccgtcaccaagttcacctcgtcctaggctcctcgtgcattagttcttgtgtttctttcctgttccctgtctgatgagttctgtagctagctgtgtgtgttctgacagtgtcatcctgtaacaatggtgctgcctgaataaa

SEQ ID NO: 4207 - DNA, 708 bp, Triticum aestivum
agacgagaagaagaacaggaggagctcaaggagaaattcgagggtctgtgcacaggtcatcaaggagttgctgggtgacaaggtggagaaggtcatcgtctctgaccgtgttgtggactctccttgctgtctggtgactggtgagtatgggtggactgccaacatggagaggatcatgaaggcccaggccttgagggactcgagcatggctggctacatgtcgagcaagaagaccatggagatcaaccctgagaacgccatcatggacgagcttcgcaagcgcgccgacgccgacaagaacgacaagtctgtcaaggaccttgtgatgctgctcttcgagacctccctgctcacctccggcttcagcctggaggaccccaacaccttcggcaccaggatccccgcatgctcaagcttggcctgagcattgacgaggacgacgaggcgcctgagaacgacaccgacatgccacccctggaggatgacgctggtgagagcaagatggaggaggtcgactaagcgcaaggccgtcggctgtcgtcgttggatgtccatgccctgcgttgtttttatctttagtgtcgaagttcgatggttttggcacgtttagctgtatcggttttgtcttttggctggccaacattaagcgcggttagctgtttgtggtactcgtggaacagttcgttattgttggttctacatatgtgt

SEQ ID NO: 4208 - DNA, 655 bp, Triticum aestivum
gtgacaagttgagaaggtcatcgtctctgaccgtgttgtggactctccttgctgtctggtgactggtgagtatgggtggactgccaacatggagaggatcatgaaggcccaggccttgagggactcgagcatggctggctacatgtcgagcaagaagaccatggagatcaaccctgagaacgccatcatggacgagcttcgcaagcgcgccgacgccgacaagaacgacaagtctgtcaaggaccttgtgatgctgctcttcgagacctccctgctcacctccggcttcagcctggaggaccccaacaccttcggcaccaggatccaccgcatgctcaagcttggcctgagcattgacgaggacgacgaggcgcctgagaacgacaccgacatgccacccctggaggatgacgctggtgagagcaagatggaggaggtcgactaagcgcaaggccgtcggctgtcgtcgttggatgtccatgccctgcgttgtttttatctttagtgtcgaagttcgatggttttggcacgtttagctgtatcggttttgtcttttggctggccaaacattaagcgcggttagctgtttgtggtactcgtggaacagttcgttattgttggttctacaatatgtgttagctatatttttatattc

SEQ ID NO: 4209 - DNA, 545 bp, Triticum aestivum
gggacaagcaccttcaccactacattatatacggggagactgtacaggacagattcgaacactaccgccggctgagaaatccttccacgactgctgtccagcaagcgatacacgggctctcgtactgcgtctacggcaagcctgatgtgcggcgcttgatgttcgaggtgtttgacttcgaacaggtccagccgaaagctgtatgaggaggatatgctccgtgtcggtttgtgttgaactgatgaccggcgagattgtcagcgcttgaaggaaaaaatgcagggtcgtcaaaatcctagcgcgggtcagatcgcgctcttccgaagcctgagcccaaagccggcccgcagattaaagcaagcactgcccgtccagcctcttctggacccccacagctcttgtaacctcttgtcttgcgtactagagataggcagctgtattagagatgattaaaattgaacgccgtagttttttcgaagttacagttttgagagttgactgtaaattccagtttgagcagaaacacaaacagctgcagctgcagc

SEQ ID NO: 4210 - DNA, 665 bp, Triticum aestivum
gaagcatctcgacgcgcctggcaggtgggctgtcagagaagcataggaggttgctgatgaacaagtattgcgggcggtacctgcgggacaagcaccttcaccactacattatatacggggagactgtacaggacagattcgaacacaaccgccggctgagaaatccttccacgactgccgtccagcaagcgatacatgggctctcgtactgcgtctacggcaaacctgatgtgcggcgcttgatgttcgaggtgtttgactttgagcaggtccagccgaaagctgtatgaggaggatatgctctgtgtcggtttgtgctgaactgatgaccggcgagattgccagcgcttgaaggaaaaatgcagcatcatcaaaatcctagcgcggatcagatcgcgctgtttcgaagcctgagcccaaagccggacggtggattaaagcaagcactgcccgtccagcctcttctggacccccacagctcttgtaacctcttgtcttgcgtactagagataggcagctgtattagagatgattaaaattgaacgccgtagttttacagttttgagagttgactgtaaattccaatttgagcagaaacaaaaacagctgctgctgcagcagcaggaagatatagagttatccgtgagaaacatgctttgtaatgt

SEQ ID NO: 4211 - DNA, 656 bp, Triticum aestivum
aatgtgcgcaaagtcgtgattttggagtagctttgaagacgttttactgcaacaccatggaagatgacccaggcacatacagatggatggcgccggagatgtgtaagcgcaagccatatggtccgaaagtcgatgtttatagttttgggctcgtcttgtgggaactggttagtggttcgatcccttatgaagagatgactccgctccaagcagcctatgcagttgttaataagaacttgagaccagttgttccttcgagctgcccgacaccattgcaacaattgatggagcaatgctggtccgctcaacctgagaagaggcctgagtttactcagatagttaaaacccttgaaaatctcaaggcgactcttgatagagatggaaccattgagaagaccagctgccaggaagcagctcaggagcaaaacaagaacaggcttgccaactggatcctaaagctctcatatagcccaccggatttctcagggcccccgccgccgaagctgctgtgattgtgtgccctcttcctcccagaacgtgttatgtggagtagatcacaactctgtaaatcaatttttcgttgtatataaaaacaactacacgagacacacctttctttttctttacattatagatcacaataaatattttctgga

SEQ ID NO: 4212 - DNA, 681 bp, Triticum aestivum
cgttgattttggagtagcttttgaagacgtttactgcaacacgatggaagatgacccaggcacatatagatggatggcgccggagatgtgtaagcgcaagccatatggtccgaaagtcgatgtttacagttttgggcttgtcttgtgggaactggttagtggttccatcccttatgaagagatgactccgctccaagcagcctatgcagttgttaataagaacttgagacccgttgttccttcgagctgcccgacaccattgcaacaattgatggagcaatgctggtccgctcaacccgagaagaggcccgagtttacccagatagttaaaacccttgagaatctcaagacgactcttgatagagatggaaccattgagaagaccccaacccccagctgccaggaagcagctcaggagcaaaacaagaacaggcttgccaactggatcctgaagctctcatatagcccaccggatttctcagggcccccgccgccgaagctgctgtgatcgtgtgccctcttcctcccagaatgtgttatgtggagtagatcacgactctgtaaatcaatttttcgttgtatataaacacaactacacgagacacctttctttttctttacagatcacaataaatatttccgggactctgtttttagaagaaaaaacatctcatagaatag

SEQ ID NO: 4213 - DNA, 703 bp, Triticum aestivum
  N_region (372)..(372): n = any nucleotide
cagaagataaaggagtccacctggttccggaaaggtgcccggggagaaccttacagcgaaggagagactgccaagtgagaatgccaccacagatgctgtcccaacacttggtgtgaggcgccaggaagaacagccatgaagacgggaagcccctgcagtgacaaatttaaatgcctttgaaatcatctctttctccacagggtttgacctctctggcctattcgtcgagaaggagagcaaaaaggaagcaaggttcacttcagaacagcctgcctcagccattgtctcgaagctggaagccgtcgcgaagacgctgaatctcagggtgaggaagaaggataatggtgttgtcaagatgcaagtgaggaaggnaaggcaggaatgggtgttcttcagtttgactcggagatctttgagatcagcccctcgtaccatctcattgagatgaaacaaacaagcggcgattcactggagtaccagaagctattggaggagagcatccggccagcactgaaggacatttgtctgggcatggcatggagctgatggtcagcaggagcctcaagggtagatttagatgtctcacttattatgtttagttctgctttttttttcagctcgagtaattgtgttatatactctacatgagtgtgctctttgtcacaaataaattgttccttcttttgtattcgacaagtaataa

SEQ ID NO: 4214 - DNA, 604 bp, Triticum aestivum
atggcgttcgacttcacgaccaagggcatcctgcagtcggcggtgcagggcgagctgtggaggatgcgtgacaaggagggcaacgctcccgggatgatcggcttgttgccggagaaggcggtcacgttcgtggacaaccacgacacgggctcgtcgcagaagaagtggccgttcccggccgacaaggtcatgatgggctacgcctacatcctcacgcaccctggagttccatgcatcttctacgatcacgtgttcgactggaacctgaagcaagagatcaacgcgttggcggcggtgaggaaccgcaacgggatcaacgccgggagcaagctgcgcatcctggcggcggagagcgacatgtacgtggcgacggttgacgagaaagttatcgtcaagcttggaccgaggttcgacgctggcagcgtcatcccgtcggacttccacgtcgtggctcacggcaataactactgcgtctgggagaagagcggccttcgggtgccggccgggcggcgctagctagctagacgcaccggctgccagaccgttgtactcctacaagaaatgtttgattccagttcgtaggctacccaataaagtttgtacc

SEQ ID NO: 4215 - DNA, 492 bp, Triticum aestivum
ggtcacgttcgtggacaaccacgatcacgggctcgtcgcagaagaaatggccgttcccggccgacaaggtcatgatgggctacgcctacatcctcacccaccctggagtcccatgcatcttctacgatcacgtgttcgactggaacctgaagcaagagatcaacgcgctggcggcggtgaggaaccgcaacgggatcaacgccgggagcaagctgcgcatcctggcggcggagagcgacatgtacgtggcgacggttgacgagaaagttatcgtcaagctcggaccgaggttcgacgctggcagcgtcatcccgtcggacttccacgtcgtggctcacggcaataactactgcgtctgggagaagagcggccttagggtgccggccgggcggcgctagctacctagtagacgttagcaacttcgcaccggcggccagaccgttgtactcctacaagaaatgtttgttccagttcgtcgtagactaggcaata

SEQ ID NO: 4216 - DNA, 514 bp, Triticum aestivum
tgaatccctttgtcgtggatcttgatgaacacaacgctctacacctcaccaagacaggtctacctcaccggagagaaaagaagagaagcgaagatgtcggggcgcggcaagggaggcaagggtctgggcaagggcggcgccaagcgccaccggaaggtcctccgggacaacatccagggcatcaccaagccggcgatccgtcgtctggcgcgtcgtggcggcgtgaagcgcatctcggggctcatctacgaggagacccgcggcgtgctcaagatcttcctcgagaacgtcatccgcgacgccgtcacctacaccgagcacgcccgccgcaagaccgtcaccgccatggacgtcgtctacgcactcaagcgccagggacgcaccctctacggattcggaggctaggccaccaccaccagattagagtgtctggggttcgtggtcgttgatgtaattgcagcatctcgctgttgtttgctatcttctgtagaatggaatggaatggaaattgaac

SEQ ID NO: 4217 - DNA, 460 bp, Triticum aestivum
caaagacaggtcgacctcaccgaggagaagaaaggagaagcgagaaagatgtcggggcgcggcaagggaggcaaggggctcggcaagggcggcgccaagcgccaccggaaggtcctccgcgacaacatccagggcatcaccaagccggcgatccgtcgtctggcgcgtcggggcggcgtgaagcgcatctcggggctcatctacgaggagacccgcggcgtgctcaagatcttcctcgagaacgtcatccgcgacgccgtcacctacaccgagcacgcccgccgcaagaccgtcaccgccatggacgtcgtctacgccctcaagcgccagggacgcaccctctacggattcggaggctaggccaccatcaccgccagattagagtgtctagggttcgtggtcgttgatgtaatcgcagtatctcgctgctgtttgctatcttctgtagaatggaattaaa

SEQ ID NO: 4218 - DNA, 851 bp, Triticum aestivum
agcttgatgacagcgaggaagagaagaagaggaaggaggagctcaaggagaagttcgaggggctctcaaggtgatcaaggagtgctgggcgacagggttgagaaggtgatcgtctctgaccgcgtcgtcgactcaccgtgctgcctcgtcaccggcgagtacggctggaccgccaacatggagaggatcatgaaggcccaggccctgagggacacgagcatgggcggctacatgtcgagcaagaagacgatggagatcaacccagagaacgccatcatggaggagctgcgcaagcgcgccgacgtggacaagaacgacaagtctgtcaaggacctggtgatgctgctgttcgagacctccctgctcacctcgggcttcagccttgacgaccccaacaccttcggcaccaggatccaccgcatgctcaagctgggcctgagcatcgacgaggacgaggaggctgctgaggctgacacggacatgccgccgttggaggaggacgccggcgagagcaagatggaggaggtcgactaggcgtgtgcatttgcttgctatccgagtcctagagctagtttatcttttgggttactgtcgcgtggtcggtttgtcttttgtggtttactgtgcctagcctgccctaatggggctaggggagtggtctgtggagtccccggaactgcgtaccgtaatcgttgcttatatatatcgtctttagtaccttccgagttaatcgccttgtttgctctttttgctttctgctggccttcttggctttttattgcgaattcctgtatttctcggtgaagtttttctcgagtttggtgctgacttgttcttgaatgaatacaaat

SEQ ID NO: 4219 - DNA, 734 bp, Triticum aestivum
tctgccactaaaggaaggcctgaagcttgatgacagcgaggaagagaagaaagaggaaaggaggagctcaaggagaagtttgagggggctctgcaaggtgatcaaggaggtgctgggcgacagggtcgagaaggtgattgtctctgaccgcgtcgtcgactcgccgtgctgcctggtgaccggcgagtatggctggactgccaacatggagaggatcatgaaggcccaggccctgagggacacgagcatgggcggctacatgtcgagcaagaagacgatggagatcaacccggagaacgccatcatggaggagttgcgcaagcgcgccgacgctgacaagaacgacaagtctgtcaaggacctggtgatgctgctgttcgagacctccctgctcacctctggattcagcctcgacgaccccaacaccttcggcaccaggatccaccgcatgctcaagctgggcctgagcatcgacgaggacgaggaggctgctgaggctgacacggacatgccgccgctggaggaggacgccggcgagagcaagatggaggaggtcgactaggcgtgtgcgttcgcttgctatccgagtcgtagagctagcttatcttttgggttactgtcgcgtggtcggtttgtcttttatggtttactgtgcctagcctgctgtaatggggctaggggagtggtctctggagtccccggaactgcgtatcgtaatcgttgcttatatatat

SEQ ID NO: 4220 - DNA, 707 bp, Triticum aestivum
gaggaagagaagaagaggaaggaggagctcacaggagaagttcgagggcttctgcaaggtgatcacaggaggtgctgggcgacagggtcgagaaggtgattgtctctgaccgcgtcgtcgactcgccgtgctgcctggtcaccggcgagtatggctggaccgccaacatggagaggatcatgaaggcccaggccctgagggacacgagcatgggcggctacatgtccagcaagaagacgatggagatcaacccggagaacgccatcatggaggagctgcgcaagcgcgccgacgcggacaagaacgacaagtctgtcaaggacctggtgatgctgctgttcgagacctccctgctcacctctggcttcagcctcgacgaccccaacacgttcggcaccaggatccaccgcatgctcaagctgggcctgagcatcgacgaggacgaggaggctgctggggctgacacggacatgccgccgctggaggaggacgccggcgagagcaagatggaggaggtcgactaggcgtgtgcatttgcttgctatccgagtactagagctagcttatcttttgggttactgtcgcgtggtcggtttgtcttttgtggtttactgtgcctagcctgccctaatggggctaggggagtggtctgtggagtccccggaactgcgtatcgtaatcgttgcttatatatatcatctttagtg

SEQ ID NO: 4221 - DNA, 687 bp, Triticum aestivum
ggcttcggcgcggagtactgcggcgccggctgccagggcggcccctgccgcgccgacatcaagtgcggcagccaggccggcggcaagctgtgccccaacaacctctgctgcagccagtgggggtactgcggcctcggttccgagttctgcggcgagggctgccagaacggcgcttgcagcaccgacaagccgtgtggcaaggacgccggcggcagggtttgcactaacaactactgctgtagcaagtggggatcccgtggcatcggtcccggctactgcggtgcaggctgccagagcggcggctgcgatggtgtcttcgccgaggccatcgccaccaactccactcttctcgcagaatgatgatcttgctaatggtagtattgcaacgacgaataatccgtggcagttccattgccacgtacggttttcccttcacttacttttagtactagtacttaataattctctagcttgcaatatgacatgcaggttactgcagcagaaacaaaatattgctgtagtacatgcatggaaatattaccgagagaagtgctgtgtggcaatatagagtgtactattgttgccacaaattagtgttcttgttatgacctgctgtcaggatgcatgcatgcatcgctgttgtaatgttggagtacttcgtgatatcgttacaatatattaccatga

SEQ ID NO: 4222 - DNA, 678 bp, Triticum aestivum
aatccggcttaaactgataccaacatagttaagggcctggatgtccgaaagctgtggtgaacaaccaatctgcatactggccagagcactttcgtgcaagtattcgagggatcaaacttcatcgaagttgatgtggatattgggtcttccatagttcaaatgcaattgttcatctggcatttggttacgtggcgacactgactatagatttagcatttgttattgagagtcaagctgaatcagagctccccgagagacttcttggagctgtaaggttctctgagttgagtccgggatcagctggtgtgtacgaagtgccatctgaagagcagcaggaaattgctccaattctgccttcaagattatggcggagtttttcccaactgctacagaatccaggcaactcaatgcagccgtcgcctagctcagaaaacactaacggaaactttcacaagaagatgctggtaacaacgataattgatatccctgaatcccatactagaggagatgtatacacctcccatcaaaggatgccttcattggttgaggataatatgccagttcaggcgatgtgtaaaagttgaatttgtttttatgacgatggacgacggcctcaggcacttgtggattatcatagtcccgggccctgctgtaaaaatgatacatagtggtcagaga

SEQ ID NO: 4223 - DNA, 671 bp, Triticum aestivum
ggtgaacaagccatctgcatacttggcagagcactttcgtgcaagtatgtcgagggatcaaacttcatcgaagttgatgtggatattgggtcttccatagttgcaaatgcaattgttcatctggcatttggttacgtggcgacactgactagatttagcatttgttattgagagtcaagctgaatcagagctccccgagagacttcttggagctgtaaggttctctgagttgagtccgggatcagctggtgtgtatgaagtgccatctgaagagcagcaggaaattgctccaattctgccttcaagattatggcggagtttttcccaactgctacagaacccaggcaactcaatgcagccgtcgcctagctcagaaaacactaacggaaactttcacaaagaagatgctggtaacagcgataattgatatccctgaatcccatactagaggagatgtatacacctcccatcaaaaggatgccttcattggttgaggataatatgccagttcaggcgatgtgtaaaagttgaatttgtttttatgacgatggacgacggcctcaggcacttgtggattatcatagtcccgggccctgctgtaaaaatgatacatagtggtcaagagagaacaacatctttctgtacatattaactaaatttaccttacagcc

SEQ ID NO: 4224 - DNA, 564 bp, Triticum aestivum
caccaccgttcccctccaaatccacccgatccaatctgcccgctcgcagctccaaggaaggaggaagccgtcgaccatgtccggccgcggcaagggcgggaaggggctgggcaagggcggcgccaagcgccaccggaaggtgctccgcgacaacatccagggcatcaccaagccggccatccgccgtctggcccgcaggggcggcgtgaagcgcatctccgggctcatctacgaggagacccgcggcgtgctcaagatcttcctggagaacgtcatccgcgacgccgtcacctacaccgagcacgcccgccgcaagaccgtcaccgccatggacgtcgtctacgccctcaagcgccagggccgcaccctctacggattcggcggctaggccccctgctccgtccagtctttgctctcccggctgttacatctgtccgagcgcgtgtgttgttcaatcgttggtgagtgtttggtctgtgtagttagtgcaaggcgatgtgtatgaatgcaatggaatcagcgttggtattaatactatcttttcccatctctcgatgcttaata

SEQ ID NO: 4225 - DNA, 554 bp, Triticum aestivum
gccgcagcaacacccacacttacagagaagcccaatctcgccggagagggaagcgtcgaggatgtcgggccgcggcaagggagggaaggggctgggcaagggcggcgccaagcgccaccggaaggtgctccgggacaacatccagggcatcaccaagccggccatccgtcgtctcgctcgccgtggcggcgtgaagcgcatctcggggctcatctacgaggagacccgcggcgtgctcaagatcttcctggagaacgtcatccgcgacgccgtcacctacaccgagcacgcccgccgcaagaccgtcaccgccatggacgtcgtctacgcgctcaagcgccagggccgcaccctctacggattcggcggctaggccacgccggtccagcagaacccacctcgcgccgccagattcactagctagccatggttgttcagtgttcattgtcttcggtgtaatggaacggccgcatctcgctgctgtctgttgttcagtgtactgtgtttggatgtactaggatggaatggaaatcgcggcgttttacccctgaatt

SEQ ID NO: 4226 - DNA, 784 bp, Triticum aestivum
cgccctgctcgcgctcgccttcgagcacatggccagcgtcgactcctaccctccggatgtcgaccccgccaagcacaccgcccgcgtcgtccgggccattggtgagctcgcgcgctgcatcggatcagagggcctcgtcgccggccaggttgttgatctggagatgactggctcaactgagactgtaccacttgaccgccttgagtacatccatctgcacaagactgctgccttgcttgaggcctcagtggttattggagcaatcatcgggggtggctcggaagagcagattgagcggttgcgcaagtacgcgagatcaattgggttgctgttccaggtggttgatgacattcttgatgtgaccaagtcatcagaggagctagggaagacagctgggaaggacttggcgagtgacaagacgacatacccaaagttactagggttggagaagtcacgggaatttgcggagaagttgctttctgatgcaaaggagcaacttgctgattttgatgaagagaaggcagcaccgctattgtacttggccaattatattgcctatcggcagaactaaggtgatggttattctgttgtttgttgttgatctgtaactttgtaagaacatcaagtctgggatttgaggaatatctgaattcttcccctcatatatactagttgagttttctaccattgtgtcatgagaatatttaggtgacaaaagccacatgagttaggtggcaaataccaatgtcccattgagatagccaagactttataatgggaatca

SEQ ID NO: 4227 - DNA, 704 bp, Triticum aestivum
aggatatattgccgcaagacgagcttgcggaggcagggctctccgatgaagacatcttcaaaggagtcgtcaccgacaagtggagaaaattcatgaagaggcagatcaagagggcgaggatgttcttcgaggaggcggagcgaggggtgactgagcttaggaaggagagccggtggccggtttgggcctctctgttgttgtaccggcagatccttgacgagatcgaagcgaatgactacaacaacttcaccaagagggcctatgttgggaaggcgaaaaaggtgcttgcgctccctgtcgcgtacgggagatcgctgctcttaccgtattcactgagaaataaccagacctagaagaaagaacaaagcaagatgaagatggtcaggttaggctagatagaatgaaacatggcagtgtggcgacatctgccttggagctctgcatccagttagttggccaaacaatgcggcgaatcgatcagtacaatcctcagtgatcaatgttgtaggcatgacatgaagttctggcaaaggaagggagaagaacactgcagccaaccgagatgaagaccaaatgtttgcatgtatattattattctagaacatgtgcctttgaagacagaacaacatgtatatatatactcgttgttggtcccgaattcgggaaacatgtatgttattctgtaagcatatatattcgaataa

SEQ ID NO: 4228 - DNA, 705 bp, Triticum aestivum
gccccagtgatctcagccgagaaggcttaccatgagcagctctctgttgccgagatcaccaacagcgccttcgagccttcctccatgatggccaagtgtgacccccgccacggcaagtacatggcctgctgcctcatgtaccgtggtgatgtttgtgcccaaggatgtcaacgccgctgtggccaccatcaagacgaagcgcaccatccagtttgtggactggtgccccactggtttcaagtgtggtatcaactaccagccacccagcgttgtcccaggcggcgaccttgccaaggtccagagggccgtctgcatgatctccaactccaccagcgttgtcgaggtcttctcccgcatcgaccacaagttcgacctgatgtacgccaagcgtgccttcgtccactggtacgtgggtgagggcatggaggagggagagttctctgaggcccgtgaggatctcgctgccctggagaaggactatgaagaagttggtgctgagttcgacgagggtgaggatggtgatgagggtgatgagtactagagcagctgagattgcgacctgatgatctgcccgagtggctttatctgttttctgtctgtttgaattgaatgtttgctgtgtggtgtttggtttacaacctgttgtgttgtatgaacctgcttcgcaccttggtcaatatgcatgttatccggtttgcctacacc

SEQ ID NO: 4229 - DNA, 811 bp, Triticum aestivum
gtgaatgagtttcagaccaacctggtgccctacccgaggatccacttcatgctttcctcctacgccccagtgatctcagctgagaaggcttaccatgagcagctctctgtcgctgagatcaccaacagcgccttcgagccttcctccatgatggccaagtgtgacccccgccacggcaagtacatggcctgctgcctcatgtaccgtggtgatgttgtgcccaaggatgtcaacgctgctgtggccaccatcaagacgaagcgcaccatccagtttgtggactggtgccccactggtttcaagtgtggtatcaactaccagccacccagcgtcgtcccaggcggcgaccgtcgccaaggtccagagggccgtgtgcatgatctccaactccaccagcgttgtcgaggtcttctcccgcatcgaccacaagttcgacctgatgtacgctaagcgtgccttcgtccactggtacgtgggtgagggcatggaggagggtgagttctctgaggcccgtgaggatcttgctgccctggagaaggactatgaagaagttggcgctgagttcgacgagggcgaggacggtgatgagggtgatgagtactagagcagatgagtttgcgacctgatgtacgtcaagcgtgccttcgtctactactatcctgtgatctgcccaagcggctttatctgttgtctgcctgtttgaatgtttgctgtgtggtgtttggtttacaacctgttgtgttgtatgaacctgtggtatgtttgaacctgcttcgcaccttggtcaatatgcatgttatctcgtttgcct

SEQ ID NO: 4230 - DNA, 853 bp, Triticum aestivum
ttgacctatgccgtgaccgtatcaggaagcctgcagacaactgcactggtctccagggttccttgtcttccacgctgttggaggtggaactggctctggccttggttctcttgctccttgagcgtctctctgttgactatggaaagaagtccaagcttgggttcacagtgtacccatcccctcaggtctccacctctgttgttgagccatacaacagtgtcctgtccacccactctctccttgagcacactgatgtggctgtcctccttgacaatgaggccatctatgacatctgccgccgctcccttgacattgagcgcccaacatacaccaacctcaataggctcgtttctcaggtcatcttatccctgactgcttccctgaggtttgatggtgctctgaatgttgatgtgaatgagtttcagaccaacctggtgccctacccgaggatccacttcatgctttcctcctacgccccagtgatctcagctgagaaggcttaccatgagcagctctctgtcgctgagatcaccaacagcgccttcgagccttcctccatgatggccaagtgtgacccccgtgaggatcttgctgccctggagaaggactatgaagaagttggcgctgagttcgacgagggcgaggacggtgatgagggtgatgagtactagagcagatgagtttgcgacctgatgtacgtcaagcgtgccttcgtctactactatcctgtgatctgcccaagcggctttatctgttgtctgcctgtttgaatgtttgctgtgtggtgtttggtttacaacctgttgtgttgtatgaacctgtggtatgtttgaacctgcttcgcaccttggtc

SEQ ID NO: 4231 - DNA, 515 bp, Triticum aestivum
ggactatgaagaagttggtgctgagttcgacgagggtgaggacggtgatgagggcgatgagtattaagcctgcctcctggtgctttcccaaggcggtgaccttgccaaggtccagagggctgtgtgcatgatctccaactccaccagtgtcgtcgaggtcttctcccgcatcgaccacaagtttgacctgatgtacgccaagcgtgccttcgtccactggtacgtcggtgagggcatggaggagggagagttctctgaggcccgtgaggatctcgctgccctggagaaggactatgaagaagttggtgctgagttcgacgagggtgaggacggtgatgagggcgatgagtattaagcctgcctcctggtgctttcccaaggcttgctactgctatcctatgatctgcccgagtggctttatctgttatctgtctgtttgaacgtttgctttgtggtgtttgttttacaacctgttgtgttgtaagaaccttgtatctttgaacctgctttgcacc

SEQ ID NO: 4232 - DNA, 766 bp, Triticum aestivum
tgccctacccgaggatccacttcatgctttcctctatgccccagtgatctcagcgagaaggcctaccatgagcagctgtctgttgccgagatcaccaacagcgcctttgagccttcctccatgatggccaagtgcgacccccgccatggcaagtacatggcctgctgcctcatgtaccgtggtgatgttgtgcccaaggatgtcaacgctgctgtggccaccatcaagaccaagcgcactatccagtttgttgactggtgccccactggcttcaagtgtggtatcaactaccagccacctggtgtcgtcccaggcggtgaccttgccaaggtccagagggctgtgtgcatgatctccaactccaccagtgttgtcgaggtcttttcccgcatcgaccacaagtttgacctgatgtacgccaagcgtgccttcgtccactggtacgtgggtgagggcatggaggagggagagttctctgaggcccgtgaggatcttgctgccctggagaaggactacgaagaagttggtgctgagttcgacgagggtgaggacggtgacgagggcgatgagtactagagcctgcctcctggtgctttcccaaggcatgctgctgcaatcctatgatctgcccgagtggctttatctgttatctgtctgtttgaacatttgctttgtggtgtttgttttacaacctgttgtgttgtaagaaccttgtatgtttgaacctgttatgcaccttggttaatatgcatgctatctggttatc

SEQ ID NO: 4233 - DNA, 807 bp, Triticum aestivum
ccactcagcttttcctccgtatgccccagtgatctcagctgagaaggcttaccatgagcagctgtccgttgctgagatcaccaacagcgcctttgagccttcgtccatgatggccaagtgcgacccccgccacggcaagtacatggcctgctgtctcatgtaccgtggtgatgttgtgccaaaggacgtcaacgctgctgtggccaccatcaagaccaagcgcactattcagtttgttgactggtgccccactggcttcaagtgtggtatcaactaccagccaccaggtgtcgtcccaggcggtgaccttgccaaggtccagagggctgtgtgcatgatctccaactccaccagtgtcgtcgaggtcttctcccgcatcgaccacaagtttgacctgatgtacgccaagcgtgccttcgtccactggtacgtcggtgagggcatggaggagggagagttctctgaggcccgtgaggatctcgctgccctggagaaggactatgaagaagttggtgctgagttcgacgagggtgaggacggtgatgagggcgatgagtattaagcctgcctcctggtgctttcccaaggcttgctactgctatcctatgatctgcccgagtggctttatctgttatctgtctgtttgaacgtttgctttgtggtgtttgttttacaacctgttgtgttgtaagaaccttgtatctttgaacctgctttgcaccttggttaatatgcatgctatctggttatctacaccatagcctccattttcctgttttataatttgtattgtttcatttgtattac

SEQ ID NO: 4234 - DNA, 746 bp, Triticum aestivum
gatccacttcatgctttcctcctatgccccagtgatctcagctgagaaggcctaccatgagcagctgtctgttgctgagatcaccaacagcgcctttgagccttcatctatgatggccaagtgtgacccccgccacggcaagtacatggcctgctgtctcatgtaccgtggtgatgttgttcccaaggatgtcaacgctgctgtggccaccatcaagaccaagcgcactatccagtttgttgactggtgccccactggcttcaagtgtggtatcaactaccagccaccaggtgttgtcccaggcggtgaccttgccaaggtccagagggctgtgtgcatgatctccaactccaccagtgtcgtcgaggtcttctcccgcattgaccacaagtttgacctcatgtacgccaagcgtgccttcgtccactggtacgtgggtgagggcatggaggagggagagttctctgaggcccgtgaggatcttgctgccctggagaaggactatgaagaagttggtgctgagttcgacgagggtgaggacggtgacgagggcgacgagtactagagcctgcctccaggtgctttcccaaggcgtgctgctgctatcccatgatctgcccgagtggctttatctgttatctgtctgtttgaatctttgctttgtggtgtttgttttataacctgttgtgttgtaagacccttgtatctttgaacctgttatgcaccttggttaatatgcatgctat

SEQ ID NO: 4235 - DNA, 757 bp, Triticum aestivum
agatcactggattgtttagcaacaggttcctaaagtctggtgtgcagaaggctggcagcaaaatgagccatgacaaagctggaaatgaacaatttgtgacagagacgagcaaatgggtcttccatgagaggggtcatctgaaggcagtgaatgtcaagcaccataaggttggggagacaaatgagcctagcatgtaccgcatcaatgatgacttggaatactcagttgagatatatgaatggtctggtacaagctggaagccatatgttgctgatgatgttcagattcagtttttcatgatgagcccttatgttctgaaaaatatgtcaactgacaaaactgctgtatattcagcatccttcaaagttccagatgtttatggagttttccagttcaaggttgagtaccaaaggcttggatacactggcctctctcttgcaaagcagattccagtgcgtccatacaggcatgatgagtatgagaggttcataacttcagcgtttccgtactatgctgcctcattttcaacaatgggagccttcttcatattctcagttgcgtacctctatcacaaatagatagctcatcgagtagtggaagtaaatcaaggtggcgatggaattgtgatgtcataagcctggtgatcttaggtgcaattttatggaaccatatttttgtagcgccaatctgtagtacctttatttttaagaaatgggcttctccctgcccccaacctttattaacatttttgctaata

SEQ ID NO: 4236 - DNA, 819 bp, Triticum aestivum
tcggcgtcactacaagatagcattccatgcactctaccgtatcaccgctgatgaaggcgtccttgcgctttggaagggtgcaggcccaactgtggtgagagccatgtcactgaatatgggtatgcttgcgtcctatgatcaaagtgttgagctgttcagagacaaattgggtgccggggaatatcagactgttattggagccagtgccatttctggattctgtgcggctgcttgcagtctgccctttgattacgtgaaaacacaaattcagaagatgcaacctgatgccactggcaagtacccatacactgggtctttggactgcgccatgcaaaccttgaagaccggtggcccatttaagttctactccggcttccctgtatattgtgtcaggatcgccccgcatgtcatgatgacgtggctcttcttgaatcaaatccagaagtaccagaagaagatcggcatataagatctccagttggagacaagagtaccaatccttgttcgacacatttaataactttccagcagctttgcactcccgtggttgtttttggtagacagagttttaagcaatttttaccgtagcttacatttgctgtggtactcttgacgttgttacaataatcacataatcacattatttgttgtatttggggcaatttttttggcgggcatacttctgtaggttgggcacagacatagacaatactactacctgcttgtgccatcttgtcttgtatggtatgtgttcaattttatctgtggctcgaaaaaataaatcctttctacctgtgccttgcaccatatgctcttaaa

SEQ ID NO: 4237 - DNA, 1406 bp, Triticum aestivum
gccttccctccgctcgcgtctgctacacttcctctcccggcccggctagatctcgccggcaggagatggcggacgcgaagcagcagcaggccgcggcgcccactggcgtctggaagacgatcaagccattcgtcaatggcggcgcctccgggatgctcgccacctgcgtcatccagcccatcgacatgatcaaggtgaagatccagttgggcgagggatctgcagctcaggtcgcaaagaccatgtatgctaatgagggccttggttccttttacaagggtttgtcagctggtttactaaggcaagcgacctatacgacagctcgtcttggatccttcagggttttgacaaacaaagcaattgaggcaaatgatgggaagccattgccacttgttcagaaagcttttattggtctgactgctggagcgattggcgcatgtgtgggcagtcctgctgatttggcactcattaggatgcaagctgactcgaccctaccagcagcacagcggcgtcactacaagaatgcattccatgcactctaccgtatcaccgctgatgaaggcgtccttgcgctttggaagggtgcaggcccaactgtggtgagagccatgtcactgaatatgggtatgcttgcgtcctatgatcaaagtgttgagctgttcagagacaaattgggtgctggggaatatcagactgttattggagccagtgccatttctggattctgtgcggctgcttgcagtctgccctttgattacgtgaaaacacaaattcagaagatgcaacctgatgccactggcaagtacccatacactgggtctttggactgcgccatgcaaaccttgaagaccggtggcccatttaagttctactccggcttccctgtatattgtgtcaggatcgccccgcatgtcatgatgacgtggctcttcttgaatcaaatccagaagtaccagaagaagattggcatataagatctccagttggagacgagagtatcaatccttattcgacacatttaataactttccagcagctttgcactcccgtggttgtttttggtagacagagttttaagcgatttttaccgtagcttacatttgctgtggtactcttgacgttgttacaataatcacattatttgttgtaattggggcaatttttttggcgggcatacttctgtaggttgggcacagccatgagacaatattactactccctccgttctaaattactcgtcgcagaaatagatgtatctagaactaaaatacatctaaatatatccatacctacgacaagtaattcggaacaagtaattcggaaggagggagtacctgcttttgccatcttgttttgtatggtatgtgctcaattttatctgtggctcgaaaaaatcaatcctttct

SEQ ID NO: 4238 - DNA, 870 bp, Triticum aestivum
cgcatgtgtggcagtcctgctgatttggcactcattaggatgcaagctgactctaccctaccagcagcacagcggcgtcactacaaaaatgcattccatgcactctaccgtatcactgctgatgaaggtgtccttgcactttggaagggtgcaggcccaactgtggtgagagccatgtcactgaatatgggtatgcttgcgtcctatgatcaaagtgttgagctgttcagagacaaattgggtgccggagaatatcagactgttattggagccagtgccatttctggattctgtgcggctgcttgcagtctgccctttgattacgtgaaaacacaaattcagaagatgcaacctgacgccactggcaagtacccatacactgggtctttggactgcgccatgcaaaccttgaagaccggtggcccattcaagttctactccggcttccctgtatattgtgtcaggatcgccccgcatgtcatgatgacgtggctcttcttgaatcaaatccagaagtaccagaagaagatcggcatataaatctccagttggagacagagtatcaatccttgctccacacatttaataactttccagcagctttgcactcccgtggttgtttttggtagacagttttaagcaatttttaccgtagcttacatttgctgtggtactcttgacgttgttacaataatcacataatcacattatttgttgtaattggggcaatgtttttggcgggcacagccatgagacaatactactgcctgtttgtgccggcatatttctgtgggcatatttctgttggctgggcacaaccatgagactattactaccggtgtgccatattgtcctgtatggtgtgggctc

SEQ ID NO: 4239 - DNA, 697 bp, Triticum aestivum
cggcagagaacaagaacgacggggcagaagaacaagatcaccatcaccaacgacaaggggcggctgagcaaggaggagatcgagaagatggtgcaggaggcggacaggtacaaggcggaggacgaggagcacaagaagaaggtggacgccaagaacgcgctggagaactacgcctacaacatgcgcaacacggtcaaggacgacaagatcgcctcgaagctcggggcggacgacaagaagaaggtggaggacgcgatcgagggcaccatcagctggctggacgccaaccagctcgccgaggccgacgagttcgaggacaagatgaaggagctggagggcatctgcaaccccatcatcgccaagatgtaccagggcgctgcgccggacatgggcggcggcatgggcatggacgaggacatgccggccggcggcggtggcgccggccccaagatcgaggaggtggactaagcttttgttgttccgtggtggtctccggtctgcgcgttgcttgatgggtgtcctttcgatgggtggtgtcagtcgtctgtcgtcgtgtcatctagtagctggaagtagtagtagtagtgcgtcgtgggagtcgttggtctgaaggacatgatggatcatgatgtttgcttgtggtttgggaacccttgaagcttagagcttctcgtttaaatttgggtgcttccctact

SEQ ID NO: 4240 - DNA, 706 bp, Triticum aestivum
aacggcatcctgaacgtgtcggcggaggacaagacgactgggcagaagaacaagatcaccatctaccacgacaaggggcggctgagcaaggaggagatcgagaagatggtgcaggaggcggagcggtacaaggcggaggacgaggagcacaagaagaaggtggacgccaagaacgcgctggagaactacgcctacaacatgcgcaacacggtcaaggacgacaagatcgcctccaagctcggcgccgacgacaagaagaaggttgaggaggcgatcgagggcaccatcagctggctggacgccaaccagctcgccgaggccgacgagttcgaggacaagatgaaggagctggagggcatctgcaaccccatcatcgccaagatgtaccagggcgccgcgccggacatgggcggcggcatgggcatggacgaggacatgcccgccggtgctggcggcgccggccccaagatcgaggaggtggactaagctgttcgtccaatgtctgcgcgctacttgatgggtgttctgtctcggtgtcctctggatgccgctcggtggtgtcagtcgtctgtcgtcgtgtcatctagctgcaagtagtagtagtggttcgttggagtcgtttgatctgaaagacatgatggatgatgatgtttgcttgttggtttggtacccttgatgcttagtgcttctcgttgtttaagtttaa

SEQ ID NO: 4241 - DNA, 601 bp, Triticum aestivum
ggcggagaggtacaaggcggaggacgaggagcacaagaagaaggtggacgccaagaacgcgctggagaactacgcctacaacatgcgcaacacggtcaaggacgacaagatcgcctccaagctcggcgcggacgacaagaagaaggtggaggaggcgatcgagggcaccatcagctggctggacgccaaccagctcgccgaggccgacgagttcgaggacaagatgaaggagctggagggcatctgcaaccccatcatcgccaagatgtaccagggcgccgcgccggacatgggcggcggcatgggcatggacgaggacatgccggccggcggcggcggcgctggccccaagatcgaggaggtggactaatttgttggtccgtgcccgtggtggtctccggtctgcgcgctacttgatgggttcgctgtctcggtgtccgtcctttggatgccgctcggtggtgtcagtcgtctgtcgttgtgtcatctagctggaagtagtagtagtcgttcgatggagtcgttggtctgaaggacatgatggatcatgatgtttgctttggtttggaacccttgaagcttagagcttctcgtttttaag

SEQ ID NO: 4242 - DNA, 502 bp, Triticum aestivum
  N_region (11)..(11): n = any nucleotide
ccattatcccntgttagactgcttccatctcatctccggcgatgtctgggcgtggcaagggcggcaaggggctcggcaagggcggcgccaagcgccaccggaaggtgctccgcgacaacatccagggcatcaccaagccggcgatccggaggctggcgaggaggggcggcgtgaagcgcatctcggggctcatctacgaggagacccgcggcgtcctcaagatcttcctcgagaacgtcatccgcgacgccgtcacctacaccgagcacgcccgtcgcaagaccgtcaccgccatggacgtcgtgtacgccctcaagcgccagggccgcaccctctacggctttggcggctgagcgccatcagctcgctggctgaccctgctgtttcctgcgttgctctgtagtcgtatcccccctgtcgtgaatctagtgcgctggctatgcttgtttctgtagtttgtctagtgaaatccaacttctagttgtaactcctatcgtttcct

SEQ ID NO: 4243 - DNA, 834 bp, Triticum aestivum
cttttcattgttgcgaaacgaaacgataggagttacaactagaagttggatctcactagacaaactacagaaacaagcatagccagcgcactggattcacgacgggggggagtaagactacagagcaaagcaggaaacagcagtgtcagccagcggcagcgcgctgatggcgctcagccgccgaagccgtagagggtgcggccctggcgcttgagggcgtacacgacgtccatggcggtgacggtcttgcggcgggcgtgctcggtgtaggtgacggcgtcgcggatgacgttctcgaggaagatcttgaggacgccgcgggtctcctcgtagatgagccccgagatgcgcttcacaccgcccctcctggccagcctccggatcgccggcttggtgatgccctggatgttgtcccggagcaccttccggtggcgcttggcgccgcccttgccgagccccttgccgcccttgccacgcccagacatcgccggagatgagatggaagctgtctaccatctcgtcgtcttcgtcagcaagttatcttcagtgtcgtctgtcgtcgtgttcctgtgtcagtcagtcttgagtcgtgtgtgtcgttcggtcctgtggtgtttttgatcgcgagctcgagtgtcgctctgtccggggttaattagagctggttacgcgaggaagaaacacatgtgttatctttcggtcggtcggtcggtcgtgttcgtcggtgatgcagcaatcccttctgtgccgaaagggggatgtgctgttggaatcctatgtttgaactcagtttaaatggatgaagaaaatgcaagtgatagctgcgaaatatcc

SEQ ID NO: 4244 - DNA, 610 bp, Triticum aestivum
  N_region (547)..(547): n = any nucleotide
aatccccaatcccctccaatccaactttcgggacagcagccagcaagcgtcgccagccatgtcaggccgaggcaagggaggcaagggcctgggaaagggcggcgcgaagcggcacaggaaggtgctgcgcgacaacatccaggggatcacgaagccggcgatccggcggctggcgcggcggggcggcgtgaagcgcatctccgggctgatctacgaggagacccgtggcgtgctcaagatcttcctcgagaacgtcatccgcgacgccgtcacctacacggagcacgcccgccgcaagaccgtcaccgccatggacgtcgtctacgcgctcaagcgccagggccgcaccctctacggctttggcggctgagccagggtcgtgcctcgcgtgggatttagatgtggttaggcgggtcgtcgttctgtggtgtgtgcttgtcctgtgtgtgcgtgtgcagctgcgtgctggtggttgtaatgagttccagattataatatgggtgttcatctcgccttggattgaatcgtgtgttttgctctgatctgnccactggcgaggtctgtccctgcagacttcgaacattaggccgtttgtttgtactactagtat

SEQ ID NO: 4245 - DNA, 489 bp, Triticum aestivum
aatcccctccaatcccaccttcggaacagcagccagcaagcgtcgccagccatgtcgggccgcggcaagggaggcaagggcctgggaaagggcggggcgaagcggcacaggaaggtgctgcgcgacaacatccaggggatcacgaagccggcgatccggcggctggcgcggcggggcggcgtgaagcgcatctccgggctcatctacgaggagacccgcggcgtgctcaagatcttcctcgagaacgtcatccgcgacgccgtcacctacacggagcacgcccgccgcaagaccgtcaccgccatggacgtcgtctacgcgctcaagcgccagggccgcaccctctacggcttcggcggctgagcgcggttcgtgcctcgcgtgggatttagatgtggttaggcgggtcgtcgttctgtggtgtgcttgtcctgtgtgtgcgtgtgcagctgcgtgctggtgcttgtaatgagttccagattctaatat

SEQ ID NO: 4246 - DNA, 476 bp, Triticum aestivum
  N_region (14)..(14): n = any nucleotide
  N_region (29)..(29): n = any nucleotide
  N_region (35)..(36): n = any nucleotide
  N_region (38)..(38): n = any nucleotide
  N_region (80)..(80): n = any nucleotide
  N_region (208)..(208): n = any nucleotide
  N_region (475)..(475): n = any nucleotide
aggtgggttgcccnaccgcgtgggcatcnggcttnntngccccttaatggactaaatggactgccacgactccgacccanacgcgctcggcccttcacatggccacgaagctcaatgaccacggcatcctttatctccacatgattgagccccggatggcccctcgtcgacggccggcgcgtggtcccgcaccgcctgctgccctacngggaggccttcaagggcacctttattgcgaatggcgggtatgaccgggaggagggggacaaggcggtcgcatcggggtatgccgacctcgtctcgtttgggcggctcttccttgcgaacccagacctgccgaagaggctagagctcaacgcgccgcttaacaagtataataggttgacgttttacatctccgatcccgtcgtcggctataccgactacccgtttcttccttgatgtgtcattgaaccatgaataatgattgatccana

SEQ ID NO: 4247 - DNA, 425 bp, Triticum aestivum
tggactgccacgactccgacccgcacgcgctcggtctccacatggccacgaagctcaacgaccacggcatcctctacctccacatgattgagccccggatggccctcgttgacggccggcgggtggtcccgcaccgactacttccctacagggaggccttcaagggcacctttattgcgaatggcgggtacgaccgggaggatggggacaaggcggtcgcatcggggtacgccgacctcgtctcgtttgggcggctattcctggcaaacccagacctgcccaagaggctagagctcaacgcgccgcttaacaagtacaataggatgacgttctacatctccgatcccgttcgtcggctacaccgactacccgtttcttccttgatgtgtcattgaaccatggataatgattgatattatgtcatt

SEQ ID NO: 4248 - DNA, 887 bp, Triticum aestivum
gttcgggttctggttcggttcgggtccgagagtagctagcctagtctagggtttccgtagagaggaagggagagggagatccatccatggcggagacggagtaccgctgcttcgtgggcggcctcgcctgggccaccgacgacaacaacctccagcaggccttcagccagtacggcgagatcctcgacgccaagatcatcaacgaccgcgagacggggaggtcccgcgggttcggcttcgtcacgttcggcagcgaggagtcgatgcgccaggccatcgaggagatgaacggcaaggagctcgacgggcgcaacatcaccgtcaacgaggcccagtcccgccgctcgggcggagggggcggcggcgcggcggctacggcggccagcgcggcggtggcggcggcgactccggcggccagtggaggaactgagcctcgaatctcccagttatcgatctatctaccgtgtcgtcggtcgtcgtcttcgttagcaagttatcttcggtgtcgtcgtgttcctgtgtcagtctgagtcgtcgtgtgtgtggtgtttttgatcgcgagctcgagtgtcgctctgtccggggttaattagagctggttacgcgaggaagaaacaacatgtgttactatctttcagtcggtcggtcggtgtcggtcggtcagtcggtgatgcagcaatccccttctgtcatggattgggatgtgatgttggaatatcctatgtttgaacaagtttaaatggatgaagaaaatgcaagtcatagctgcgaaatatcctctctctttgttccttaaatttctcttgttctgaagcatccattcaactttcttcaagctataaggattgaattgctctgtgaagcatgcaaacttgctcccatttcag

SEQ ID NO: 4249 - DNA, 634 bp, Triticum aestivum
  N_region (39)..(39): n = any nucleotide
  N_region (76)..(76): n = any nucleotide
  N_region (78)..(78): n = any nucleotide
  N_region (86)..(86): n = any nucleotide
caaaggaggtgggccgcccaccgcgtgggcatccgcctntcgcccttcatggactacatggactgccacaactccnanccgcacgntcttggcctccacatggccacgaagctcaacgaccacggtatcctctacctccacatgattgagccccgtatggccctcgttgacggtcggcgggtggtcccgcaccggctgctgccctatagagaggccttcaagggcaccttcattgcgaatggcgggtacgaccgggaggagggggacaaggcggtcgcatcggggtacgccgacctcgtctcgtttgggcggctcttcctggcgaacccagacctgccgaagaggctagagctcaacgcgccgcttaacaagtacaataggatgacgttctacatctccgatcccgtcgtcggctacaccgactacccgtttcttccttgatgtgtcattgaaccttgaataaagattgattcatatattgccatgtgaacttctaatggaaccttttctttttctcggctcttccctttttcccacatgtacatgtggctttcttatgtacaatttttccggctgtatagaagtcgcaaaattccgagtgtttaagttttgaaagattaaatttgaaaatatt

SEQ ID NO: 4250 - DNA, 714 bp, Triticum aestivum
  N_region (590)..(590): n = any nucleotide
cgctcctccaatcccacattcgctcgcagctcgaaccaaggagagaccgtcagccatgtccgggcgcggcaagggaggcaaggggctcggcaagggcggcgccaagcgccaccggaaggtgctgcgcgacaacatccagggcatcaccaagccggcgatccggaggctcgctcggaggggcggcgtcaagcgcatctccggcctcatctacgaggagacccgcggcgtgctgaagatcttcctcgagaacgtcatccgcgacgccgtcacctacaccgagcatgcccgccgcaagaccgtcaccgccatggacgtcgtctacgccctcaagcgccagggccgcaccctctacggcttcggcggctaggctcgtcctcacctccgtgcaaattccgatgtgcctatccccctgtgcgccgtagtctcgctgtccagaaaacttagctgaaatgagttccccatgtttatctccgctgtttccttcgtaggattagctgtatcgtcaaacaaagctgttcgcatctgaagtttgaatccaatcttgtgtctacgcaaatattgtggttgtggttttgctgtgatttttactntgcgctgttgcaattgtggtgtgtcgattgttccttctgtagcgcaagatctggttgctagtactgaattacagaacgaagtttccagaattcagtctgcatttcggacattgtagatttgcct

SEQ ID NO: 4251 - DNA, 717 bp, Triticum aestivum
gactgcgacggcggcctctccgtggaccaggtctcctcggcgcagaggaagaaggtgaagcgcgcgctctcggtctcgtccatgaacgacgcgctgctcgccgcggcggcgacggtggcctcgccgcccgtggaggtcctggagctgcgcgtgtcggaggtgagcgagaaggtgctggtggtgagcgtgacgtgcagcaagcagcgcgacgccatgaccaaggtgtgccgcgcgctcgaggagctccgcctcagggtcatcaccgccaacatcacctccgtctccggctgcctcatgcacaccctcttcgtcgaggtagatgagatggaccgcttcgagatgaaggagacggtggaggctgctctctcgcagcttgactctacggggagcccgccgcttagttcgatgagctattagggatcactgctacggtcactagtcgctggtcacctattttcacctcacctagtctctcttttgcaaggccaatattatatacgtatataccttatgtaatgtatgccagaattttgcccccttttttgcaacacccgtttatatgtgtggacggaggtgactgctttttttagtacgaggcaataactcaagggatagataaataggctaggcgtgctctggacctcaacgtgtaaaggtcttcatgagcatggcatgatatgcttctggactatgacatatttatatgtgataaataac

SEQ ID NO: 4252 - DNA, 871 bp, Triticum aestivum
  N_region (102)..(128): n = any nucleotide
  N_region (620)..(664): n = any nucleotide
gactacgacggcggtctctcccgtggaccaggtctccctcggcgcagaggaagaaggtgaagcgcgctctctcggtctcgtccatgaacgacgcgctgctcnnnnnnnnnnnnnnnnnnnnnnnnnnncccgtggaggtcctggagctgcgcgtgtcggaggtgagcgagaaggtgctggtggtgagcgtgacgtgcagcaagcagcgcgacgccatgaccaaggtgtgccgcgcgctcgaggagctccgcctcagggtcatcaccgccaacatcacctccgtctccggctgcctcatgcacaccctcttcgtcgaggtagatgagatggaccgcttccagatgaaggaggcggtggaggctgctctctctcagcttgattctacggggagcccgccgcttagttcgatgagttattagggatcactggtacggtcactagtcgctggtcacctaatttcacctcacctagtctctctgttgcaaggctaatattatatactccctccgttcctaaatacttgtctttctaggcatttcaacaagtgactacatacggagcaaaatgagtgaatctgcactttaaaatatgtctacatacatccgtatgtagtagtcatnnnnnnnnnnnnnnnnnnnnnnnnnnnnnnnnnnnnnnnnnnnnntcttatgtaatgtatgccagaattttgcacctttttttgctacacccgtttatatgtgtggatggaggtgactgcttttttcgtacgaggcaataactcaaggggtagataaataggctaggtgtgctctggacctcatgtgtaaaggtcttcatgagcattgcatgatatgcttctggactatgacatatctatgctgataaataa

SEQ ID NO: 4253 - DNA, 1243 bp, Triticum aestivum
cgggttctggttcggttcgggtccgagagtagctagcctagtctagggtttccgtagttcggagaggagagaaagggagagatccatggcggagacggagtaccgctgcttcgtgggcggcctcgcctgggccaccgacgaccacaacctccagcaggccttcagccagtacggcgagatcctcgacgccaagatcatcaacgaccgcgagacgggcaggtcccgtggcttcggcttcgtcacgttcggcagcgaggagtcgatgcgccaggccatcgaggagatgaacggcaaggagctcgacgggcgcaacatcaccgtcaacgaggcccagtcccgccggtccgccggtggggcgcggcgcggcgcgctacggcggccagcgcggcgcgtagcggaggctacggcgcggcgcggtggctacggcggccagggcggtggcggctacggccagggaggcggtggcggctacggccagggcggtggtggctacggcggccagcgcggtggcggcggctacggcggcggcggcgcgcggctacggcggcgcgcggtggtggctacggcggccagcgtggtggcggtgactccggcggccagtggaggaactgagcggcggggccctccagttatcgatctatctaccatctcgtcgtcttcgtcagcaagttatcttccagttcctgtgtcagtcagtctgagtcgtcgtgtgtgtcgttgagtcctgtggtgtttttgatcgcgagctcgagtgtcgctctgtccggggtgagaaggcaatgcagcttctcgagagtgggctgaaggtgaaggagtacgagctcttgaggaggaacttcagtgacactggttgctttgggtttggtattcaggagcacattgatcttggcatgaagtatgacccatcaaccggcatctatggtatggacttcttcgtggttctggagcgagctggataccgcgtctcccgccggcgccgatgcaaggcccgtgttgggatccaccaaagggtgaccaaggaagacgccatgaagtggttccaggtcaagtatgagggtgtcatcctgaacaagtcccacgctagctagtaacctttcgagtgattgagttgtcgttagagctttaagtcagtcaagcttaatctggatcatggaatcgtatgtttattgaatacaaagttgcactatcaattttgccttgtctgctgggctgacctgcatctataattccatcaaatcttcat

SEQ ID NO: 4254 - DNA, 937 bp, Triticum aestivum
tccaccggcggcctccccggtcagatcaccatgtcgacggagaagaagccagttgaaccccatgcgggagatcaaggcgcagaagctcgtcctcaatatctccgtcggcgagagcggcgatcgcctcactcgcgctgccaaggtgttggagcagctcagcgggcagtcgccagttttctccaaggcgaggtacactgttaggtcttttggcattcgtcgtaatgagaagatcgcctgctacgtgacgatcaggggcgagaaggcaatgcagcttctcgagagtgggctgaaggtgaaggagtacgagctcctgaggaggaacttcagtgacactggttgctttgggtttggtattcaggagcacattgatcttggcatgaagtatgacccatcaactggcatctacggtatggacttctttgtcgtactggagcgagctggataccgtgtctcccgccggcgccgatgcaaggcacgtgttgggatccaccaaagggtgaccaaggaagatgccatgaagtggttccaggtcaagtatgagggtgtcatcctcaacaagtcccacgccagctagtaaccttccgagtgattgagttgtcgttagagcttaagtcagtcaagcgtaatcaggatcatggaatcatatgtttattggatacaaagttgcactatcaattttacctcaactgttgagcttaagtcgagcgtaatcaggatcatggaatcatatgatttctggggtttttttgttcagattatcattctgttgagtggttttagttgaattagagcattacaaccggacggcctgtcctgatgtaaaattgccactcaactgcgcttgttggcaaaccctatatccatccataacgccttggacgtgcccaccacgctggatttagcagggcgcccgtcactatggccgatctgactatgt

SEQ ID NO: 4255 - DNA, 784 bp, Triticum aestivum
atcttcggattcctctccaccgcggcctcccccgtcagatcaccatgtcgacggagaagaagcagttgaaccccgatgcgggagatcaaggtgcagaagcttgtcctcaacatctccgtcggggagagcggcgatcgcctcactcgcgctgccaaggtgttggagcagctgagcgggcagtcgccagttttctccaaggcgaggtacactgtcaggtcttttggcattcgtcgtaatgagaagattgcctgctatgtgacgatcaggggtgagaaggcaatgcagcttctcgagagtgggctgaaggtgaaggagtacgagctcctgaggaggaacttcagtgatactggttgctttgggtttggtattcaggagcacattgatcttggcatgaagtatgacccatcaaccggcatctacggcatggacttctttgttgttctggagcgagctggataccgtgtctcccgccggcgccgatgcaaggcccgtgttgggatccaccaaagggtgaccaaggaagacgccatgaagtggttccaggtcaagtatgagggtgtcatcctgaacaagtcccacgctagctagaaaggcttttgagtggaatcttatgtttattggatacaaagtttgcactatcaattttgcctgttccgttgggctgacctgcatctataattccaccaaatcttttcatggtttcatatttgaagttgaacatttcatcaacttttttcctactatatactattgtctatcattctctcatttagccagcaaagca

SEQ ID NO: 4256 - DNA, 1834 bp, Triticum aestivum
  N_region (118)..(142): n = any nucleotide
ggcgatcgaggcgggcggtctcgcggcggcgggggcgatggtcctcgtgctgggcgcgctcgcgctcgcggcctactacagcttctactcggacgtggccgtgcagttcctcgggatnnnnnnnnnnnnnnnnnnnnnnnnncggaacgagaccaagtcgttcctgttccagctctaccccaaggcgcaccagggccgcgcgctgcgggaattcggcgacatcaagctcgccgccaagagggtcgatgacggcggcggcaggaaggtcacgaagaagctggatgtcaagggggcgacatcggctgggacgaactccacagttctgctcccgatcaagggcaatgtgttccccgatgggcagtattacacatctatctttgttggcaatccaccaagaccttatttccttgatgttgatactggaagcgatttaacatggattcagtgtgacgcaccatgcacaaactgtgcccaaggacctcatcctttatataagccagcaaaagaaaagatagtccctcccagggatttgctatgtcaagagtttgcaaggcgatcagaactactgcgaaacttgcaagcaatgtgactatgagattgaatatgccgatagaagctcgtctatgggtgttcttgcgaaggatgatatgcatctaatcgctacaaatggtggaaaggaaaagctagactttgtatttgggtgtgcatatgatcagcaaggccagcttttgtcctcaccagcaaagaccgatgggattcttggtcttagcagtgcagcaataagccttcctagtcagctggccagcaaaggaattatttccaacattttcggtcattgtatcactagagaaacaaatggtggggggtacatgtttctgggtgatgattatgtaccaagatggggaatgacatgggctcctattcgaggtggtccagacaacttataccacacagaagcccagaaagtaaattatggagatcaggagctcagcatgcatgggcacgcaggaaattctgttcaagtgatttttgatagcgggagctcatatacataccttccagaggaaatgtataaaaaccttattgatgctattaaggatgactctcccagttttgtccaggatagctcagatacgacattacctctatgctggaaagctgatttttctgttaggtccttcttcaagcccttgaaccttcattttgggagaagatggtttgtcgtgccgaaaacattcaccattgttcccgatgattacttgattatcagtgaaaagggcaatgtttgtctggggctgctaaatggaacagagatcaatcatgggtcaaccataattgtcggagatgtttctctgcgcggcaaactagttgtgtatgacaatgagcggaggcagatcggatgggccaattcagagtgcaccaagccacaatcacagaagggctttcccttcttcctctgaggggcattgttgcaaaatatacatatgtaagcggcacatagagaataccattggagctgcctctggatagcagctgccatcgcgtgccctatttcatctacagtcgctagccatggttcccgctgtctgttgtaatacttgtttgtaatgcaccgcattgtttgtatatacgcaagaatcaatgtactccctccgtccagaaatatttgtcggaggaatggatgtatctagatgtattttagttttagatacatccatttttatgtatttctccgatgagtatttccggatggagggagtatgtacgtattattgagctgtagatagaatttcagcctatattgaagtcaatagcacgtcctgaaattatgaaa

SEQ ID NO: 4257 - DNA, 636 bp, Triticum aestivum
tctctgccaccgcgcaggtcacgctcgcctcccgcaccccatgccgcgtcggcatcttctacaggcgcctcgacgtcttcgtcacctaccgcgacgagcccgtcaccgtgccgatctccctgccgcccatgtaccagggccaccgggacgtcacaatttggtcccccgtgctgtccggggagtccgtgcccgtggccggatacgttgccgaggccatgaagcaggacatcgcctccgggtacgtgtcgctgcaggtcaagatcgacggccgcgtcaagtggaaggtcgggagctggatctccggcagctaccacctcttcgtcagctgccccgccatgctcgccgccggccccggcggcatgccgctcgggggtggccccaacggcaccgggggcgccgtcgcgtcactgaaattcacgcagccgacagggtgcaccgtcggcacgtgatagaatggactctgcatacggtcgcacgtccgtactgtaagtggaaggaactacatagcgcggttcttcggttgttgtgtttattgtagtagtaatatataaattgtctaaagctcttaatttctgtatgactcgttaagaataaactgtgttgatgcatgtactcattcaattttggaattaaatg

SEQ ID NO: 4258 - DNA, 899 bp, Triticum aestivum
  N_region (895)..(895): n = any nucleotide
gccactgcacgcacacctaccagtcacacagagcagagtacagagagcagagccatgaacaaggagaagcatcacaggaacgagcacctcctccggcgctgctgcggcggcttcgcggcgtgcctcctggcgctggtcgtcgtcgtcgcattcatcgcgctcgtcgtctaccttgcgctccgcccgaccaagccttccttctacttgcaggacctgcagctccactccatcaacctcggggacccctccctttctgccaccgcgcaggtcacgctcgcctcccgcaaccccaatgaccgcgtcggcatcttctacaggcgcctcgacgtcttcgtcacctaccgcgacgagcccgtcaccgtgccgatctccctgccgcccatgtaccagggccaccgggacgtcaccatttggtcccccgtgctgtccggggagtccgtgcccgtggccggatacgtcgccgaggcaatgaagcaggacatcgcctccgggtacgtgtcgctgcaggtcaagatcgacggccgcgtcaagtggaaggtcgggacctgggtctccggcagctaccacctcttcgtcagctgccccgccatgctcgccgccggccccggcggcatgccgctcgggggtggccccaacggcaccgggggcgccgtcgcgtcactgaaattcacgcagccgacagggtgcaccgtcgggacgtgatagaatggacttgtgcatacggtcgcacgtccgtactgtgagtggacgaaactacgtacgtagcaggctagttcttcactccgtgtctctacataacttatgtttatattctactagtaaattgtctacagcttctaatttttgtatgtctcgtgtaacgggagaataaactgtgttgatgtatgtacaacantcag

SEQ ID NO: 4259 - DNA, 779 bp, Triticum aestivum
cttcaagccatcgcctggttcacatcataaacagtagtggtggtccagataacacttgttaggggcgagaccaagcagagaggcgattgtggaggtgatcaacaagttgatgtggctggcttctgtatgcaccacggtggcattcatatcctcctcttacatagtggtgggtcggcacttcaagtgggcggcgctgctggtgaccctcattggcggggtgatcatggccagtgtgctcggcacgatgacatactatgtggtgaagtccaagcgcacgcggtcgattaggaagaaggtgaagtcaacaaggcggagcggctcaaactcatggaaccacaactcggagtcagattccgagatagaccggatatacgccatatgagggtgatctccggtcttctatggatcttcagtgttttcggcggcgccacacgacacggatgtaaaaagaaaggtgggatggcactcaatatgaacagctttcaccctccaggtgccaagggttttaccgtatacattccaataagctggtgttcctggatcggcaggaggagccaggacgcgacggtcgtgttgtatacatcttctacagatagattgtgatcatcagaatatgcatgcagcctgtgctgtgctccctatgcatggctggctggctggccttcataaaatttctctcagcctttttctgtaccttttgttaatatgctgtggtagcagaatggtcggtatgtgtacttagcactctgtaccttgtatttcatctgatagctgagaag

SEQ ID NO: 4260 - DNA, 627 bp, Triticum aestivum
cggacgcgtggccgaacgcgtgggttttttaagcagcgaatatagaaatataatgactaacacatattgtagaaccaacaataacgaactgttccacgagtaccacaaacagctaaccgcgcttaatgtttggccagcccaaagacaagtcaacctcaccgaggagaagcagagagaagggagaagatgtcggggcgcggtaagggaggaaaggggctcggcaagggcggggccaagcgccaccggaaggtgctccgggacaacatccagggcatcaccaagccggcgatccgtcgtctggcgcggcggggcggcgtgaagcgcatctcggggctcatctacgaggagacccgcggcgtgctcaagatcttcctcgagaacgtcatccgcgacgccgtcacctacaccgagcacgcccgccgcaagaccgtcactgccatggacgtcgtctacgcgctcaagcgccagggccgcaccctctacggcttcggcggctaggccaccgccagattagctagcctgtgtctagggttcgttgtccatgatgtaattgcagcatctcgctgttgtttgctatcttctgtagaatcgaatggaatggaaattgaactatttatcattgaatct

SEQ ID NO: 4261 - DNA, 516 bp, Triticum aestivum
  N_region (23)..(23): n = any nucleotide
  N_region (49)..(49): n = any nucleotide
tgcatcgcagaaaggaaaatatngtagtagatattgaataaggagcatncgatagcacatatccccccacgcgtccggcagctaccacaaagacaagtcaacctcaccgaggagaaggaaggagaagggagaagatgtcgggccgcggcaagggaggcaagggactcggcaagggcggcgccaagcgccaccggaaggtgctccgcgacaacatccagggcatcaccaagccggcgatccgtcgtctggcgcggcggggcggcgtgaagcgcatctcgggtctcatctacgaggagacccgcggcgtgctcaagatcttcctcgagaacgtcatccgtgacgccgtcacctacaccgagcacgcccgccgcaagaccgtcaccgccatggacgtcgtctacgcgctcaagcgccagggacgcaccctctacggattcggaggctaggccgccaccagattagctagcctgtgtctagggttcgtggtcgttgatgtaatcgcagcatctcgctgct

SEQ ID NO: 4262 - DNA, 869 bp, Triticum aestivum
  N_region (21)..(21): n = any nucleotide
tgaagaagaaggctatgagtncatctacatgtttgacgccattgatgagtatgccattggtcagctcaaggagtttgagggcaagaagcttgtctctgccaccaaggagggtctgaagcttgatgagagcgaggacgagaagaagaagcaggaggagctcaaggagaagtttgaggggctgtgcaaggtcatcaaggaggtgctgggcgacaaggttgagaaggttatcgtctctgaccgtgtggtggactccccttgctgtctggtgactggcgaatatgggtggaccgccaacatggagaggatcatgaaggcccaggccttaagggactcgagcatggctggctacatgtcgagcaagaagaccatggagatcaaccctgagaacgccatcatggacgagctccgtaagcgtgccgatgccgacaagaacgacaagtctgtcaaggacctcgtgatgctgctcttcgagacctccctgctcacctccggcttcagcctggaggaccccaacaccttcggcaccaggatccaccgcatgctcaagcttggcctgagcattgatgaggatgacgaggcgccagagaacgacaccgacatgccgcccctggaggacgacgccggcgagagcaagatggaggaggtcgactaagcgccaaggctgcctgtcggctgtcgtcgtcagatgtccatgccctgcaccgcctagttgtttttatcttagtgtcgacgttggatggttttggcacgttttagctgtatcggttttgtcttttggctggccaaacattaagcgcggttagctgtttgtggtactcgtggaacagttcgttattgttggttctacaatatgtgttagttattatatt

SEQ ID NO: 4263 - DNA, 552 bp, Triticum aestivum
caccaccgttcctccgattccacatctgctcgcagctcgaagaggatcgtcagccatgtccggccgcggcaagggaggcaaggggctcggcaagggaggcgcgaagcgccaccggaaggtgctgcgggacaacatccagggcatcaccaagccggcgatccggcggctggcccgtaggggcggcgtgaagcgcatctcggggctcatctacgaggagacccgcggtgtgctcaagatcttcctcgagaacgtcatccgcgatgccgtcacctacaccgagcacgcccgacgcaagaccgtcaccgccatggacgtcgtctacgcgctcaagcgccagggccgcaccctctacggattcggcggctaggccaccaccagatcagtagcctgatagtcgggtgtagtcgcagcatctcgctgctgtttgtcctgccttgtttgttctctggatgtacttctgtactaggatggaatggaaattgcagcagtttacccttgaattcgtacctagtctgtgggtctgttgatgtttgttcgtgcgcgtggtcagat

SEQ ID NO: 4264 - DNA, 898 bp, Triticum aestivum
gtcccagctagcagcccttcactcgtacacacagagactgagcccagttgatcagatcaggtcaccatgagcaagggcaaggttcaccacgactggatcctccggcggtgctgcggctccgtcgccgcctgcatcctcacgctcgccgtcctcgtcggcttcgtcgcgctcgtcatctacctcgccctgcacccctccaagccctccttctacctccaggacatccagctccgctccatcgacctcgccgatccggctctctcctgacgtccaggtgacctcgcgtcccggaccccgaacgaccgggtggcatctactacaagaccctgcacgccttcaccacgtaccgcgacgagccggtgacggtgccggtgtcgctgccggcgatctaccaggggcacaaggaccagtcggtgtggtcgccggtgatgtccggggactcggtgccggtggcgccctacgtggcggacgccatgaagcaggacatcgcggccgggtacgtgctgctgcacgtgaaggtggacggccgcgtcaagtggaaggtcggcagctgggtctccggcggctaccacatcttcgtcaactgccccgcgctgctctccgccagcggcggctccgtcggcggcgccttcgccatgagcgccacggtgggcggcaagcagaccgtctcgctcaagttcacgcagccgtcctactgcaccgtcgacgtgtgacgcggacgcacgtcgtgtctcgccggggcgacgtcgagcgctcttaattatttgcaggagtaaatcttgtagagtagcaacaaccatgatatgatagtgtataattatcaccatttccttaccctgtttttctgaatctgtgcagaataatgctactgcttttttatacatcctattataagttg

SEQ ID NO: 4265 - DNA, 675 bp, Triticum aestivum
acctcgccgatccggctctctcccttgacgtccaggtgaccatcgcgtcgcggatcccgtacgaccgggtgggcatctactacaagaccctgcacgccttcaccacgtaccgcgacgagccggtgacggtgccggtgtcgctgccggcgatctaccagggacacaaggaccagtcggtgtggtcgccggtgatgtccggggactcggtgccggtggccccctacgtggcggacgccatgaagcaggacatcgccgccgggtacgtgctgctgcacgtgaaggtggacggccgcgtcaagtggaaggtcggcagctgggtctccggcggctaccacatcttcgtcaactgccccgcgctgctctccgccagcggcggctccgtcggcggtgccttcgccatgagcgccacggtgggcggcaagcagaccgtctcgctcaagttcacgcagccgtcctactgcaccgtcgacgtgtgagtgacgcggacgcacgtcgtctcgccggggcgacgctgagagcgacgtcgagcgctcttaattatttgcaggagtaaatcttgtagagtagcaacaaccatgatatgatagtgtataattatcaccaatttccttaccctgtttttctgaatctgtgcagaataatgctactacttttttatacatcctattataagct

SEQ ID NO: 4266 - DNA, 834 bp, Triticum aestivum
ctgatcgtagtcactaagcataccaatttggtcatcacgaaataaaggacattcatactacatagtgagtatctgaaacagtattgctctggtatatatctgacgcaggtgaccatcgcgtcccggaacccgaacgaccgggtgggcatctactacaagaccctgcacgccttcaccacgtaccgcgacgagccggtgacggtgccggtgtcgctgccggcgatctaccaggggcacaaggaccagtcggtgtggtcgccggtgatgtccggggactcggtgccggtggcgccctacgtggcggacgccatgaagcaggacatcgccgccgggtacgtgctgctgcacgtgaaggtggacggccgcgtcaagtggaaggtcggcagctgggtctccggcagctaccacatcttcgtcaactgccccgcgctgctctccgccagcggcggcaacgccggcggcgccttcgccatgagcgccacggcgggcggcaagcaggcagtcacgctcaagttcacgcagccgtcctactgcaccgttgacgtgtgagtgacgcggacgcacgtcgtctcgccggggcgacgctgagagcgacgtcgagcgctcttaattatttgcaggagtaaatcttgtagggtagcaacaaccatgatatgatagtgtataattatcaccaatttccttaccctgttttttctgaatctgtgcagaataatgctactacttttttatacatcgtattataagctgttctatttacccctgagtatcaaatttgtttctcatttggcaatctgtacgtcgggcgagcagagtctacttgtaaaagcagag

SEQ ID NO: 4267 - DNA, 1168 bp, Triticum aestivum
tatgacgtatgagcatcctcacgagaaaaccatactgcaattcagtttcagagtttcatattacaatctagagatgcaaaaatgcaaatggtagataaatcccgatcacaaatttgccaagttagcttcggagaaccgaatgcaaagaatttcacaaactcatacggtagcaaatcagaagttgtgaacggactgacgatattgaacagagaaacaaatccaggtagcattttctcataacaagcattttaaattaaaccacaagcacgagcattcgcagagcggcgacctgatagacacactgaagccaagctagccatcccctaaccgccgaagccgtacagggtgcggccctggcgcttgagcgcgtacacgacgtccatggccgtgacggtcttgcggcgcgcgtgctcggtgtaggtgacggcgtcgcggatgacgttctcgaggaagatcttgagcacgccgcgggtctcctcataggagcgaaacacctctccctcactctcacctccgagaagctccagcggcagccatggccccaaaggcagacaagaagccggcggccgagaacaaggtggagaaggcggcggagaagacccccgcggggaagaagcccaaggccgagaagcggctgccggcaggcaagacggcgtccaaggaggccggcggcgaggggaagacccggggcaggaagaagggcagcaaggcgaagaagggcgtggagacgtacaagatctacatcttcaaggtgctgaagcaggtgcacccggacatcggcatctcctccaaggccatgtccatcatgaactccttcatcaacgacatctttgagaagctcgccggcgagtcggccaagctcgcgaggtacaacaagaagcccaccatcacctctagggagatccagacctccgtccgcctcgtcctccccggcgagctcgccaagcacgctgtctccgagggcaccaaggccgtcaccaagttcacatcctcctagactgacgacgcgccgcttgttgtgacagatgtagttggctgctgttagtcgctgactctgcttatgtatctgcaagtagtggtaggagtggtcgtctgtgtgccaacgcttcgttggctagttggttgtcagaactgaagttgctaatctatctgaatgttactgtttcaa

SEQ ID NO: 4268 - DNA, 734 bp, Triticum aestivum
  N_region (5)..(5): n = any nucleotide
gttgnatttctcgcgcgcggtcaattcgccggccgctcgaggccccaattccttcgtcctcctcctcgcgagacgcgcacagcagagccgagagggagaagatgtccgggcgcggcaagggcggcaaggggctgggcaagggtggggcgaagcgccaccggaaggtgctgcgggacaacatccaggggatcaccaagccggcgatccggcggctggcgcggaggggcggcgtgaagcgcatctccgggctcatctatgaggagacccgcggcgtgctcaagatcttcctcgagaacgtcatccgcgacgccgtcacctacaccgagcacgcgcgccgcaagaccgtcacggccatggacgtcgtgtacgcgctcaagcgccagggccgcaccctgtacggcttcggcggttaggggatggctagcttggcttcagtgtgtctatcaggtcgcccgctctgcgaatgctcgtgcttgtggtttaatttaaaatgcttgttatgagaaaatgctacctggatttgtttctctgttcaatatcgtcagtccggtcacaacttctgatttgctaccgtttgagtttgtgaaattcttttcattcggttctccgaagctaacttggcaaatttgtgatcgggatttatctaccatttgcatttttgcatctctagattgtaatatgaaactctgaaactgaattgcagtgtggttttctcgtgaggatgctcataggtc

SEQ ID NO: 4269 - DNA, 620 bp, Triticum aestivum
cacaactcccacacatcctccggcgaaaccaaaccccagcccgccgcaccgtcagcacccatggcgcccaaggccgagaagaagccggcggcgaagaagcccgcggaggaggagcccgcggcggagaaggcggagaagacgcccgccgggaagaagcccaaggcggagaagcggctgccggcggggaagtccgccgccaaggagggcggcgacaagaagggcaagaagaaggccaagaagagcgtggagacgtacaagatctacatcttcaaggtgctgaagcaggttcaccccgacatcggcatctcctccaaggccatgtccatcatgaactccttcatcaacgacatcttcgagaagctcgccggcgaggccgccaagctggcgcggtacaacaagaagcccaccatcacgtcccgggagatccagacctccgtccgcctcgtcctccccggcgagctcgccaagcacgccgtctccgagggcaccaaggccgtcaccaagttcacctcctcgtagagtgctcctgctcctgtgtctcgtagttagctgtccgggtgtgtttgtggccgtgtaatcgtgtaagaatcgcaccgtgatgtttctggatctcgagaaat

SEQ ID NO: 4270 - DNA, 588 bp, Triticum aestivum
cgagaagaagccgcgcgaagaagccccggaggaggagcccgcggcggagaaggccgagaagactcccgccgggaagaagcccaaggccgagaagcggctgccggcggggaagtcggccgccaaggagggcggcgacaagaagggcaagaagaaggccaagaagagcgtggagacgtacaagatctacatcttcaaggtgctgaagcaggtgcaccccgacatcggcatctcctccaaggccatgtccatcatgaactccttcatcaacgacatcttcgagaagctcgccggcgaggccgccaagctggcgcggtacaacaagaagccaaccatcacgtcccgggagatccagacctccgtccgcctcgtcctccccggcgagctcgccaagcacgccgtctccgagggcaccaaggctgtcaccaagttcacctcctcttaggctgttcgtcttcctgtgtctcgtagttagctgttcgggtgtgtttgtggccgtgttatcctgtaagaatcgcaccgcgatgtttctgtatctcgagaaatggtaatggtgcctgcctcatgttcagtacgtacatgctagtctta

SEQ ID NO: 4271 - DNA, 793 bp, Triticum aestivum
cccgccgccatgtcgacggagaagaagcagctgaaccccatgcgggatatacaggtgcagaagctcgtcctcaacatctccgtcggtgagagcggagatcgcctcacccgcgcctccaaggtgctggagcagctgagcggacagtcaccagtgttctccaaggctaggtacactgtcaggtcgttcggtatcaggcgtaatgagaagattgcgtgctacgtgactatcaggggtgagaaggcgatgcagctgctggagagtggcctgaaggtgaaggagtacgagctgctcaggaggaacttcagcgacaccggctgctttggcttcggtatccaggagcacatcgatctcggcatgaagtatgatccatctaccggcatctacggtatggacttctttgtggtgctcgagcgtgctgggtaccgcgtctcccgccgccgcaggtgcaaggcccgcgtcggtatccaccagagggtcaccaaggaggacgccatgaagtggttccaggtcaagtacgagggtgtcatcctcaacaagtcccatgcgagctaagaaggatgtagctctcgttagaccttgagttaattaagttcacctggttgctggatatgtatgttacctagaaaccaaatcctttgtcagttttgcctgtactcaagctggatgatttctgtttgatctgcactttcgtctaagaggctcactactgttttatcctctttgaacatagatgtttggcttatgtgatgacctgccttttgtttggtcactctcgaatctgctctaagttttt

SEQ ID NO: 4272 - DNA, 798 bp, Triticum aestivum
cccagatccgctgccatgtcgacggagaagaagcagctgaaccccatgcgggacatcaaggtgcagaagctcgtcctcaacatctccgtcggcgagagcggagatcgcctcacccgcgcctccaaggtgctggagcagctgagcggacagtcacctgtgttctccaaggcgaggtacactgtcaggtcgttcggtatcaggcgtaatgagaagattgcgtgctacgtgactatcaggggtgagaaggcgatgcagctgctggagagtggcctgaaggtgaaggagtacgagctgctcaggaggaacttcagcgacaccggctgctttggcttcggtatccaggagcacatcgatctcggcatgaagtatgatccatctaccggcatctacggtatggacttcttcgtggtgctcgagcgtgctgggtaccgcgtctcccgccgccgcaggtgcaaggcccgtgtcggtatccaccagagggtcaccaaggaggacgccatgaagtggttccaggtcaagtatgagggtgtcatcctcaacaagtcccatgcgagctaagaaggacgtagctctctttagaccttgagttaattaagttcacctggttgctggatatgtatgttacctagaaaccaaaaatgctttgtcagttttgcctgtactcaagctggatgatttctgtttgatgcgcactttcgtctaagaggctctcttctgttttatcctctctgaacaatagagtatatgtttgtcttatgatagactgccttttgtatggccactctcaaatcttctcta

SEQ ID NO: 4273 - DNA, 747 bp, Triticum aestivum
gctcccagatcccgcgccatgtcgacggagaagaagcagctgaaccccatgcgggacatcaaggtgcagaagctcgtcctcaacatctccgtcggcgagagcggagatcgcctcacccgcgcctccaaggtgctggagcagctgagcggacagtcaccggtgttctccaaggcgaggtacactgtcaggtcgttcggtatcaggcgtaatgagaagatcgcctgctatgtgactatcaggggtgagaaggcgatgcagctgctggagagtggcctgaaggtgaaggagtacgagctgctcaggaggaacttcagcgacaccggatgctttggcttcggtatccaggagcacatcgatctcggcatgaagtacgatccatctaccggcatctacggtatggacttctttgtggtgctcgagcgtgctgggtaccgcgtctcccgccgccgcaggtgcaaggcccgcgtcggtatccaccagagggtcaccaaggaggacgccatgaagtggttccaggtcaagtacgagggtgtcatcctcaacaagtcccatgcgagctaagaaggacgtagctctctttagaccttgagttaatgaagttcacctggttgctggatatgtatgttacctagaaaccgaaatgctttgtcagttttgcctgtactcaagctggatgatttctgtttgatctgcactttcgtctaagaggctcactactgttttatcctctttcaacaatagagtata

SEQ ID NO: 4274 - DNA, 640 bp, Triticum aestivum
ggactctggagctgaaggccatggctgataggataattagctgagggagcgaatacataggcctaattacaagcttaagttgactttcaaccttaacagctatatcatctcaccacaccgctgcaacaaccaccaccagcaacacacacacacacagcagccaagagaagctcgccggagagagaagagtcgacgatgtccggccgcggcaagggagggaagggcctcggcaagggcggcgccaagcgccaccggaaggtgctgcgcgacaacatccagggcatcaccaagccggcaatccggcgtctggctcggcggggcggcgtgaagcgcatctcggggctcatctacgaggagacccgcggcgtgctcaagatcttcctggagaacgtcatccgcgacgccgtcacctacaccgagcacgcccgccgcaagaccgtcaccgccatggacgtcgtctacgccctgaagcgccagggacgcaccctctacggattcggaggctaggccgcgcctgcccactcgaatccacctcgcgccaccgcattagtatctagctatgaatgttcagtgttgatggtcttcggtgtaatggaatggccgcatctcgctgctgtctgttgtttcgatgtactgctta

SEQ ID NO: 4275 - DNA, 726 bp, Triticum aestivum
gaagaagaaggccaagaagagcgtggagacgtacaagatctacatcttcaaggtgctcaagcaggtgcacaaagctccacctcctccccacaccttcgcacaaagctccacctcctccccacaccgtcgaagcacccatggcgcctaaggcggagaagaagccggcgctggagaagaccccggcggggaagaagcccgcggcggagaagagacccgcggccgggaagacggcgtccaaggagggcggcgagaagaaggggaagaagaaggccaagaagagcgtggagacgtacaagatctacatcttcaaggtgctcaagcaggtgcaccccgacatcggcatctcctccaaggccatgtccatcatgaactccttcatcaacgacatcttcgagaagctcgccggcgagtccgccaagctggcccgctacaacaagaagcccaccatcacgtcaagggagatccagacctccgtccgccttgtcctccccggcgagctcgccaagcacgccgtctccgagggcaccaaggccgtcaccaagttcacctcctcctaggcgtcttcctcgtttcatgagctgatggcggcgttctgtgtgtagttagcagtgcgatgttacaatctctgtaagaattgtgctgcttgttggtttgaagaattagtgttgttgctgtctgaattattgttcaacgtgtgcttgtattattcagttttgattggaaggt

SEQ ID NO: 4276 - DNA, 750 bp, Triticum aestivum
cggccgctcgcgatctagatccatcccagccaaacttttctctcgccctcgaagcagcagccgccgcagcatccatggcacccaaggccgccgagaagaagccggtggagaagacccccgcgggcaagaagcccaaggcggagaagaaggtgccggcgtccaaggagggcggcgacaagaaggggaagaagaaggccaagaagagcgtggagacgtacaagatctacatcttcaaggtgctcaagcaggtgcacccggacatcggcatctcctccaaggccatgtccatcatgaactccttcatcaacgacatcttcgagaagctcgccggcgagtccgccaagctcgcgcggtacaacaagaagcccaccatcacgtcccgggagattcagacctccgtccgcctcgtcctccccggcgagctcgccaagcacgccgtctccgagggcaccaaggccgtcaccaagttcacctcggcctagtttcctggtctgattcttgtgttcccttcctggtccttgtctgatgaattctgtaggtagctgtgttctgacagtgtcatgcgacattgtcatcttgtaacagagtttctgcttgtgggtttgtggctgttattcggtctggttaaatagtcaacttcacctcatcctagtattctcatctaatgtggtgaactgtagttagatgtgttctgaaagtgtcatcatgtaactttgtgctgatggtggctgttttcagtctaaataaata

SEQ ID NO: 4277 - DNA, 676 bp, Triticum aestivum
gccgtgtgacgtgggacatcgcagcatccgcagtccccccagcccacaccttccaaccaagcaccaagctccaccgccgtcgaagccacccatggcacccaaggcggagaagaagccggcgccggagaagaccccggcggggaagaagcccgcggcggagaagaggcccgcggccgggaagacggcgtccaaggagggcgggggcgagaagaaggggaagaagaaggccaagaagagcgtggagacgtacaagatctacatcttcaaggtgctcaagcaggtgcaccccgacatcggcatctcctccaaggccatgtccatcatgaactccttcatcaacgacatcttcgagaagctcgccggcgagtccgccaagctggcccgctacaacaagaagcccaccatcacgtcgagggagatccagacctccgtccgcctcgtcctccccggcgagctcgccaagcacgccgtctccgagggcaccaaggccgtcaccaagttcacctcttcttaggcttcatccttgtatcatgagttgatggcggtgttctgtgtgtagttagcagtgcgatgttacaatctctgtaagaattgtgctgcttgtgggtctgaagaattagtcaggttgctgtctgaattattgctcaatcgtgtgcttgttttattcagtttcagt

SEQ ID NO: 4278 - DNA, 635 bp, Triticum aestivum
caaagacattccaatcacttcattggttctccaaagtaaaaacaggggttccaccaggcgatttactcaaccggggaacatttagcgcacaccaccattttaccaatcacactggagcgagaagaggaagatgtcgggccgcggcaagggaggcaaggggctgggcaagggcggcgcgaagcgccaccggaaggtgctccgcgacaacatccagggcatcaccaagccggcgatccggcggctggcgcgcaggggcggcgtgaagcgcatctcggggctcatctacgaggagacccgcggcgtgctcaagatcttcctcgagaacgtcatccgcgacgccgtcacctacaccgagcacgcccgccgcaagaccgtcaccgccatggacgtcgtctacgcgctcaagcgccagggtcgcaccctctacggcttcggaggctaggccgagggttcatcgatccagctcgcgacgccgccgtccgaccgagagtagtagtggtatctatctagttgctgtctagggttcgtggttctccgtgcaagagcagtagtatttccttggtgtttgctcccgtcttgtgagctgatgttgctgttgtagagatgtactggaagaagtttggaatggaaattgc

SEQ ID NO: 4279 - DNA, 542 bp, Triticum aestivum
accaccaaaacaatccaatccaatcccccaagagagagaagaggaggaagatgtcgggccgcggcaagggaggcaaggggctcggcaagggcggcgcgaagcgccaccggaaggtgctccgcgacaacatccagggcatcaccaagccggcgatccggcggctggcgcgcaggggcggcgtgaagcgcatctcggggctcatctacgaggagacccgcggcgtgctcaagatcttcctcgagaacgtcatccgcgacgccgtcacctacaccgagcacgcccgccgcaagaccgtcaccgccatggacgtcgtctacgcgctcaagcgccagggccgcaccctctacggcttcggcggctaggccgagggcccagccgtccagctcgccacgccgccgtccgaccgagagtagtagtggtatctatctagttgctgtctagggttcgtggctctccgtgtatgcgcagtgtttcgctggtgtgtgtctgctcccgtcttgtgagctggtgttgtactggaagaaatctggaatggaaattgc

SEQ ID NO: 4280 - DNA, 540 bp, Triticum aestivum
gcagcactccctcttcttcccaatcacacacctgtcggagctaaccggagcggcgatgtcggggcgcggcaagggcggcaaagggctgggcaagggcggcgccaagcggcaccggaaggtgctccgcgacaacatccagggcatcaccaagccggcgatccggaggctggccaggaggggcggcgtgaagcgcatctcggggctcatctacgaggagacccgcggcgtgctcaagatcttcctcgagaacgtcatccgcgacgccgtcacctacaccgagcacgcccgccgcaagaccgtcaccgccatggacgtcgtctacgcgctcaagcgccagggccgcaccctctacggcttcggcggctaggttcctgggttccgttggtggcagcagcagtgtggttgcggctgtgtctgtcttgtgccctctgtgatgtgtgctgtgggagatgggatttactgctgctcttggcgtgcgtcgttgtgttccgtgtcttgtgttcagtaggctgtaatatcttgttgcggtcaatgaaacta

SEQ ID NO: 4281 - DNA, 636 bp, Triticum aestivum
gtttcattgaccgcaacaagatattacagcctactgaacacaagacacggaacacaccgtcgaccaccagcagcaacacaccaccacaccgaggccaagcgaagatgtcgggccgcggcaagggagggaaggggctgggcaagggcggcgccaagcgccaccggaaggtgctccgggacaacatccagggcatcaccaagccggccatccggcggctggcccgccgtggcggcgtgaagcgcatctcggggctcatctacgaggagacccgcggcgtgctcaagatcttcctcgagaacgtcatccgcgacgccgtcacctacaccgagcacgcccgccgcaagaccgtcaccgccatggacgtcgtctacgcgctcaagcgccagggacgcaccctctacggattcggcggctaggccacgcgaatcgacccccccaccaccagatttgtgctagtagctagctaatggctgtgtagtgttcgtgggctttggtttaatggccgcatcttgctgctgtatgtcctggccttgattgctgtttggatgtagttctggggtggaattgaaattgaagtggtttaccttgaattcttctgcgacctcccactcttttgatgttgatttgggtaagttg

SEQ ID NO: 4282 - DNA, 857 bp, Triticum aestivum
  N_region (529)..(529): n = any nucleotide
  N_region (553)..(554): n = any nucleotide
cttgaacggtatgtgaatcttggacccattgtggacttctgcgtgtttgaccttgatagtcaagggcaaggtcaggtggtcactttgttcaggagcattctaagacggttccattcgagtggttcgtaacggtatagggattaatgagcaggcttcagtagagctgcaaggcatcaagggattgtggtcactgaagtcttccttcagtgatctgtatgacatgtatctgtgtgtgagctttataagtgagactcggttcttggctatgaacatggaagatgaattagaagaaattgagatagaagggtttgatgcacaaatccagactttgttctgccaaaatgccatcaatgatatgcttatacaggttactgctaattctgtccggttagtcagttgcacttctcgggagctagtggatcagtggaatggcagcgacatacagcctgttggtcgtatacactgcagagttgttcccaacagctgtacgtaccgcagcgatgggatgtacagcacaggcatcgcagantggcgccatactggcgcccttagnngtggtgcttggggagcaagtgccattcgcggtgttcggcgtgtttgggatcattggtgggctgcttgtgatctgcctcccagagactatgaacaagcccttgtacgacaccatgttcgggctggagaaaggggagagggcacctagaagtgaagaagaagttatatcggggaactccgaaatttgactagtttttgtaattattgtgacttgaagatgttagcatggaaatgttgcacacaagagcgattggcacatgcttgaacgaattgttatttggcgttgtgctaatgcgtagcttaat

SEQ ID NO: 4283 - DNA, 1028 bp, Triticum aestivum
aaaggagatttgtttctcacttctcgaattagaaacaccaacactgatggaaagcctttctcatttacatttgcatatcatacatacttctccgtgtctgacataagcgaagtacgtattgaagggctggaaacaatggactactttgacaacctgaagggaaaagagcgattcacggagcagggggatgctcttgtgtttgaatcagagattgataaagtatatctggacacaccaccaaaaattgcaattattgatcatgagaagaaaagaacatttgtgctcaggaaagatggtcttccagatgctgttgtatggaacccatgggagaggaggtcaaaaaccattcttgattttggtgatgaagaatataagcacatgttgtgtgtggaacctgcagctgtggagaagcccattaccttgaagcctggtgaagagtggaaaggaaggttggagctctcagctgttccttccagttactatagtggccagttagatccagacaaggttcttcatggttgaaaatcctcacttggtgcatctcgtacaggaacacttcagggcactttatattacctggtgctttgtctgtctggtgttgatgctatgtggagttgcgggctttcatctcctcatcgtctccacctacatatgtttatttcttcatgtatagatggaggaggcgagcaccggaataacgaaacagcctgagtggctctatctcgaaatctgtcttcggtgcgctcagctcagtgttcagttgcagcaaaaaagaagcgaataatagcattccgtagtttagggtcgcctcctagccctggacaatgggtgatttgttgtacttctgcatcgggctaggaaatctactaccaattgttatcagactattgtctgtactcctctaagatctgtacatatgctatctttagggacttcctggtgtgagataagttaaggagccaccatttatcatgtgctgctggtaaagcattatgcaagtgtgtttttaaccttaataacacagggga

SEQ ID NO: 4284 - DNA, 704 bp, Triticum aestivum
gattgccatgtagggaagcaaaggaggtttatgagaatggacacaaacactgccttggttgcatccatctttggctctcgctagctagtctagaggagaggataaacggcttgagtaagtcgcgcgctttcctcaccatggcaaggaaaaagaatccagctacacctgaactatggcttgcagcaattcgagctgaattgaggcacgggaacaaaaggaagctgattctctactagccaaggcattacaagagtgtccacaagtggcattttgtgggctgcagctattgagatggtgccacgtccccacgcaaatcaaagagctcagatgctataaagcgatgtgatcatgatccacatgtcattgcagctgtcgccaaacttttctggcatgacaggaaggttgataaagcaaggagttggttgaacagagctgttactcttgctcctgacattggggatttttgggcattgtactacaaatttgaactccagcacggaaatgcggacacacaaagggatgttctgaaacgatgcattgcagctgaaccaaaacatggcgagagatggcaagctataagcaaggctgttgagaactcacatcagccagttgatgccatcctgaggaaagtcgttctggctcttggtgcagaagaaaatcccaatgctgcagaaccttagtccttactgtttcgttaaggtcat

SEQ ID NO: 4285 - DNA, 759 bp, Triticum aestivum
cacgatattgagaagaccaagaatgactggaaacaaaattatggaaatgataacagagccgtataggttgacacggcggtgcgaagtgactgcaattctcattctgtatggtctcccaagattgttgacaggttcaattttagctcatgagatgatgcatgcatggttgcgacttaaaggataccgcactctcagtccagatatagaagagggcatatgccaagtcctcgcccacctgtggatcgagtcggagatcatggcaggatcaggcagcaacgccgcgtcgacatcctcatcctcttcgtcgtccgcatcgtcgaagaagggcggaaggtctcagttcgagcggaagctcggcgacttcttcaagcaccagatcgagtcggacacctccgttgcctacggggacggtttcagggctgggaaccgggttgttcagcagtacggcctgaagcgcaccctcgagcacatccggctgacagggacattgccgttctgagaatgtcagagatgcacctttctgcggaagttatataccgatttgttgtcgagagtccgtttacaggaaagagaaaatgaattttgaaatgcacaaattgtacaaacgtgtggctgatattttttcttggaagggctgagcacagtatattattagagatgcatcgaggtggcttgccctgaccatctgttgtattgagggagatcaaaaatggaaatggaaacagtggtatttcttatgcgacgataaagttaataagg

SEQ ID NO: 4286 - DNA, 740 bp, Triticum aestivum
aaaattatggaaatgataacagaacctataggttgacacgccgattgtgaagtgactgcaaattctcattctatatggtctcccaagattgttgacaggttcaatttttagctcatgagatgatgcatgcgtggttgcgtcttaaaggataccgcacactcactccagatatagaagagggcatatgccaagtccttgcccacctgtggatcgagtcggagatcatggcaggatcaggcagcaacgccgcatcgacatcctcatcctcttcatcatccacatcgtcgaagaagggcggtaggtctcagttcgagcggaagctcggtgacttcttcaagcaccagatcgagtcggacacctccgttgcctacggggacggtttcagagctgggaaccgggttgttcagcagtacggcctgaagcgcaccctcgagcacatccggctgacagggaccttgccgttctgagaatgccagagatccaccttttcaccggaagctatataccgatttgtcatcgagagtccatttacaggaagaaagaaaagaaggaaatgaattttgaaatgcacaaattgtacaaacgtctggttgatattttttcttggaagggctgagcacagtatattattagagatgcattgaggtggcttgccctgaccatctgttgtattgagggagatcaaagattgaaatggaaacagtggtatttctcatgtgatcttaaagttaataaggaaa

SEQ ID NO: 4287 - DNA, 767 bp, Triticum aestivum
tattgaggagaccaagaatgacgggaaacaaaattatggaaatgataacagagccgtataggttgacacggcgatgtgaagtgactgcaattctcattctatatggtctcccaagattgttgacaggttcaattttagctcatgagatgatgcatgcatggttgcgtcttaaaggctaccgcacactcactccagatatagaagagggcatatgccaagtcctcgcccacctgtggattgagtcggagatcatggggggatcaggcagcaacgccgcgtcgacatcctcatcatcttcgtcgtccacatcgtcgaagaagggcgggaggtctcagttcgagcggaagctcggcgacttcttcaagcaccagatcgagtcggacacttccattgcctacggggacggtttcagagctgggaaccgggttgttcagcagtacggcctgaagcgcaccctcgagcacatccggctgacagggaccttgccgttctgagaatgtcagagatccaccttttcaccggaagttatataccgatttgtcatcgagagtccatttacaggaagaaaaaaaagaaggaaatgaattttgaagtgcacaaattgtacaaacgtttggttgatattttttcttggaagggctgagcacaggagattgttagagatgcattgaggtggattgccctgaccaatctgttgtatggggagagatcaaaaatggaaatggaaacagtggtgtttcttatgtgaccataaagttaataaggaa

SEQ ID NO: 4288 - DNA, 767 bp, Triticum aestivum
  N_region (434)..(454): n = any nucleotide
gaaatgagcgatggagtaatgtgcagaagcagatcgttcgctgcagtcaagcctgtcgttggcgaagaagagcctggcccctgtacgagacgcctcgggatgtcggactcgtccgtggagcagagctgggagagcaacgggaaccacgtgggcgggggctcctcccagcagctggccgcggcgccgcggatcaccgggcgcgatatgaacgccagcatgagcgtcatcgggcggctggcggaggagctggagcagcggagccaggtgttcgccgacgacgccaagttcctggtggaggtcaagtccgggcaggcggacgcgagcctgaacccggacgtggagctccgcaggctgaagcagaacttcgactcgtggaagaaggacttcggctcccgcatcagggagaccaaggtgatcctgaacaagctcgcgannnnnnnnnnnnnnnnnnnnnagtcctcccccaactcggccaagcggaagtggtggggcaggctcaacacctccaagttctcgtgagtgtatggtgatggtgacggtgtagacgcgccggcattttacacgccggcgctagtcctagagaggtttgtgagtgctgctgcggagtccagtgttttgggctggatgagtatgtatgtgattcgtggagggcgagttgtatagttcttccactggggggctgcttcttttctaggccacccatgaaccactgagttgtgatgtaattacttgctaagatataccactacttgaaggggagagattgg

SEQ ID NO: 4289 - DNA, 885 bp, Triticum aestivum
gcatctccgacgaggatcaaggtcgactcccatgcccgtcggcaagtacagcatcgtcgcccccgactccagctaccccgacgccagctccccgagtcgcaccgcgtctcccctcagggtgacgtcgccgtacgggaacagcatgcactactccgagaacgtgcagtcggggcacttcgccttcacgcggtggagcccggggactacctggcctgcttctgggcgcctgaccacaagccgcccgtcaccgtcaccttcgagttcgactggaagagcggcgtcatggccaaggactggtccaacgtcgccaagaaaggcaaggtcgatatgatggaactagagctgaagaagctagaggataccatcaaatctatccatgaagaaatgttttatctacgtgaaagggaggaggaaatgcagaacatcaacaggcagacaagctcgaggatggggtggctgagtttcctctcgctcggcatctgcttatccgtggcagggctgcagctgtggcatctgaagacctttttcgagagaaagaagctgctgtagttcccccatgatcacaaacaaatcgttgcgaattagggtatattgtttctgccagctgttaacctatgtttccagcgaatactcgaaccatcagtaagaaagaaaccgtcgatcatcatacttgtgaaatgcctttctgtgccctatcttctgcccgatcaaatacagttgtaaaatgtttccccttttttcttgaacagggctgaaatgtttctgttgatggtttcatatgatgtaacgtagagtgacattgttttctttttctagagctgagtagagccacatcgtcgctactgttatgactcgtgagtaatgttgtagtgacccaataataca

SEQ ID NO: 4290 - DNA, 759 bp, Triticum aestivum
gcgcgcctccggttcgacctcgagtccggccacaccaagtgcatctccgacgagatcaaggtcgactccatggccgtcggcaagtacagcgtcgtcgcccccgaccccagctaccccgacgcccagctccccgagtcgcaccgcgtctccctcagggtgacgtcgccgtacgggaacagcatgcactactccgagaacgtgcagtcggggcacttcgccttcacggcggtggaggccggggactacctggcctgcttctgggcacctgaccacaagccacccgtcaccgtcaccttcgagttcgactggaagagcggcgtcacggccaaggactggtccaacgtcgccaagaagggcaaggtcgatatgatggaactagagctgaagaagctagaggataccatcaagtctattcatgaggaaatgttttatctacgtgaaagggaggaggaaatgcagaacatcaacaggcagacgaactcgaggatggggtggctgagtttcctctcactcggcatctgcttatccgtggcagggctgcagctgtggcatctgaagacctttttcgagagaaagaagctgctgtagtttcccccatgatcacaaacaaatcgttgcgaattagggtatattgtttctgccagctgttgacctatgtttccaagcgaatacttgaaccatcagtaagaaagaaaccgttgatcatcatacttgtgaaatgcctttctgtgccctatcttctgtctgatcaaatacagt

SEQ ID NO: 4291 - DNA, 1104 bp, Triticum aestivum
cccaacaccacctcgtgacttcgtccgcagaccttccctcgcgcttcgactcccactccgatctccggccatggccgcggcgcgccccggatcccccgcccccagacggctgcccccctccacgctcctcctcctggccgccgtcctcctcgcggcctcgccgccggcgcgcgccctccggttcgacctcgagtccggccacaccaagtgcatctccgacgagatcaaggtcgactctatggccgtcggcaagtacagcgtggtcgcccccgaccccagctaccccgacgcacagctccccgagtcgcaccgcgtctccctcagggtgacgtcgccgtacgggaacagcatgcactactccgagaacgtgcagtcggggcacttcgccttcacggcggtggaggccggggactacctggcctgcttctgggcgcctgaccacaagccacccgtcaccgtcaccttcgagttcgactggaagagcggcgtcacggccaaggactggtccaacgtcgccaagaagggcaaggtcgatatgatggaactagagctgaagaagctagaggataccatcaaatctattcacgaggaaatgttttatctacgtgaaagggaggagcaaatgcagaacatcaacaggcagacgaactcgaggatggggtggctgagtttcctctaacttggcatctgcttatccgtggcagggctgcagctgtggcatctgaagacctttttcgagagaaagaagttgctgtagtttcccccatgatcacaaacaaatcgttgcgaattagggtatattgtttctgccagctattaacctatgtttccgagcgaatactcgaaccatcagtaagaaagaaaccgtcgatcatcatacttgtgaaatgcctttctgtgccctagcttctctccaatcaaatacagttgtaaaatgttctttttttcttgaacaggggtgaaatgtttctgttgatggtttcatatgatgtaacgtagtgcgacaccgttttgtttttctaaagctgagtagagccatatcgttgctactgttatgagtagtggtccttttagcgagtgtgggcaagtttgccaaccaaataa

SEQ ID NO: 4292 - DNA, 819 bp, Triticum aestivum
tcatcaccggcctcgtcaacgtcttcgccaccttcgtgtccatcgtgaccgtggaccggctgggccggcgcaagctcttcctgcagggcggcacccagatgctggcctgccagatcgtggtgggcagcctgattggcgccaagttcgggttcaccggcgtggccgacatccccaaggggtacgcggcgttcgtggtgttcttcatctgcgcgtacgtggccgggttcgcgtggtcctggggcccgctggggtggctcgtccccagcgagatcttcccgctggagatcaggtcggcggggcagagcatcacggtgtcgatgaacatgctgtgcaccttcatcatcgcgcaggcgttcctccccatgctctgccgcttcaagttcatgctcttcttcttcttcggcgcgtgggtggtcgtcatgaccctcttcgtcgcctacttcctgccggagaccaagaacgtgcccatcgaggagatggtgctcgtgtggaaggcgcactggtactggggccgcttcatccgcgacgaggacgtgcacgtcggcggcgcagacgtcgagatgcgctccaacggcaaggtccaggctgccaagctcccgtgacgtcgaaacgtcgtcgctggccaataagctgttaccatccgaggccgatcgaggacttttttgagtcctcgtctgaattttcaattgtcttcttctgtattatattgccatactacctaggatgatgacgacaatcagtgcgtcactaatcattctcagttccttttctttttatgaagttgctcctatgtgccgggtatatactctgtgccgtgag

SEQ ID NO: 4293 - DNA, 765 bp, Triticum aestivum
tcgctccacgatgcctacgcgaccgaagggatagcctccagtccccacatgtcgcacgctttcgaccacatcatattcgctttgctggacgacctgctggagatcgcccagaaccactccgcagaaggaccacaggaacatggaaggatccctcgtgctcgccgtgagactggtagcgaaggtgtaccttgagctgttaccggacctcttcgggctgagcagcttctgcaagctgtggctgggggtcctcagccggatggagaagtgcatcaaggccaaggtccggggcaagcgcagcgacaagcttcaggagctgatcccggacctcctcaggaacgtcctggccgcgatgaagggcagggggatcctcgccaagaggagcacgatagggggcgacagcctgtgggagctgacgtggctccatgtgaacaacatctcgacgggcctgcagtcggaggtgttcccgagccaggagtatgagccgccgagcaatgccggtagcccgagaggggggctgaacgatgccgagatcaagaactagaagaagctcatttcaacagggacgttaaggttttgatattgtaaccgcatttcgccgcctccattgtatgtatatttgttctgtccgagttgagttgctgttgttgtgtaaaacgatgtgagcagattgacatgtttgcgctgctgacctgatgagtggctgtgatgcacgtatcatcatcagcactaaaaatgctgttgtttcgcaagtttgtgtgctggttt

SEQ ID NO: 4294 - DNA, 536 bp, Triticum aestivum
gcgaagttctaccttcagctgttaccagacctcttcgggctgagcagcttctgcaagctgtggctgggggtcctcagccggatggagaagtgcatcaagaccaaggtccggggcaagcgcagcgacaagcttcaggaactgatcctggaccttctcaggaacatcctggtcgcgatgaagagcagggggatcctcgccaagaggagcacgatagggggcgacagcctgtgggagctgacgtggctccatgtgaacaacatctcgacgggcctgcagtcggaggtcttcccgagaggggggttgaacgacgtcgagattaagaactagaagaagctcatgggtatttcgcatttcgcccattgagacgtaaggttttgatattgtaaccgcatttcgccgcctccattgtatgtatatttattctgtccgagttgctgttgttgtgtaaaactgtggcagcaatgtgagcagattgacatgtttgcgctgctgacctgatgagtggctgtgatgcacgtatcatcagcactggaaat

SEQ ID NO: 4295 - DNA, 697 bp, Triticum aestivum
atcacgtcatattcgtgttgctggacgacttgctggaaatcgcccagaaccactcacagaaggaccacaggaacatggaaggatccctcgtgctcgccgtgaaactggtagcgaaggtctaccttcagctgttaccagacctcttcgggctgagcagcttctgcaagctgtggctgggggtcctcagccggatggagaagtgcatcaagaccaaggtccggggcaagcgcagcgacaagcttcaggaactgatcctggaccttctcaggaacatcctggtcgcgatgaagagcagggggatcctcgccaagaggagcacgatagggggcgacagcctgtgggagctgacgtggctccatgtgaacaacatctcgacgggcctgcagtcggaggtcttcccgagccaggagtatgagccgccgagcaatgccagtagcccgagaggggggttgaacgacgtcgagattaagaactagaagaagctcatgggtatttcgcatttcgcccattgagacgtaaggttttgatattgtaaccgcatttcgccgcctccattgtatgtatatttattctgtccgagttgctgttgttgtgtaaaactgtggcagcaatgtgagcagattgacatgtttgcgctgctgacctgatgagtggctgtgatgcacgtatcatcagcactggaaatgctgttgtttca

SEQ ID NO: 4296 - DNA, 575 bp, Triticum aestivum
  N_region (77)..(77): n = any nucleotide
gatctctcatcagagctgttcacccaatgaactcgatgaggagtttgacacattccccacaagccggagccaagagnttgtaaggatgaggtatgataggctgaggagtgttgctggaaggatacagactgttgtcggtgatatcgcaacccaaggggagagagttcaggcactgcttagttggagggatcctcgtgccacagcaatatttgtgctattctgtttcatagccgcgatagtgctgtacgtcacaccgctccaggttcttgcagcattgggagggttctatgccatgaggcacccaaggttccgacacaggcttccttcgacgccagtgaacttcttcaggcggctgccagcgaggacggacagtatgctgtgaagaagctaccatctggtggccttatcgttgtaatccctagaattactccatgtctgtcgctgtagctcgacttgccgtgttgttatttgtgactgttcgtcgttcaggacttcgagtctgtctatcgtattaggtgctggaccaagggaataatgtgctgacagcttatcatgacttgccaggttttggaagc

SEQ ID NO: 4297 - DNA, 630 bp, Triticum aestivum
gttaccggcctcgctaccctccacacatgtacaccaagatctctcatgcagaagctgttcacccagatgaactcgacgaagagtttgacacattccccacaagccggagccaagaggttgtaaggatgaggtatgataggctgaggagtgttgctggaaggatacagactgttgttggcgatatcgcaacccaaggggagagagttcaggcactgctcagttggagggatcctcgggccacagcaatatttgtgctattctgtttcatagccgcgatagtgctgtacgtcacaccgctccaggttctcgcagcattaggagggttctatgccatgaggcacccgaggttcaggcacaggttgccatcaacgccagtaaacttcttcaggcgactgccagcgaggacagacagtatgctgtgaagatgctaccatctggtggccttatcgttgtaatccctagaattacaccatgtctgtcgctgtagctcgactcgccgtgttattatttgtgactgttgtcgttcaggacttcgagtctgcctatcgtattaggtgctggatccagggaataatgtgccgacagcttatcatgacttgccaggttttggaagcatgctgatcgtttatg

SEQ ID NO: 4298 - DNA, 816 bp, Triticum aestivum
  N_region (46)..(46): n = any nucleotide
gccatcaagaaagagatctttttcctggttcttggatcgagaaccngccgaccatgtcgttcgccatcgcccggagctccagtcccgagagcaacatcgacgcgcacgcacggctccgccgtgacgagcgcaagcgcaagaggatgctgtccaacagggagtcggcgaggcggtcccgcgcgcgcaagcagcagcggatggaggagctcatcgccgaggccagccgcctccaggccgagaacgcgcgcgtggaggcccagatcggcgcctacacgaccgagctgaccaaggtggacggcgagaacgccgtgctccgcgcgcgccacggcgagctcgccgggcggctgcaggcgctcggcggcgtcctggagatcttccaggtggccggcgctcccgtggacatcccggagatccccgacccgctgctccgcccgtggcagtccccgttcgcgccccagctggccgccgccggtggcatgcccgacgcgttccagttctgagccaagagccgccaagacatgtcatgccactgcattggaccaccatggatatggttgctgctcatctactgctgctgaagaatactagtactaccagtttgtttggttcatgtttaattatggtttgattcgtgttgcttatgtaatcctagaccattattagtacttattttgtgattgtaatcttcctatgctcctagccagtggatatggataagaacaatgtcattgatgtgtgggggagcgcaaatggattgtgcctatctttgggtgatttgtaataacatcttgacatggaacctatatatatgtttgc

SEQ ID NO: 4299 - DNA, 1244 bp, Triticum aestivum
tgcttatgcattagagcccccggagttgcttcgattcgcggctaagtcctgctttctcccttcccgttcttacgtttcagtccttgtagcttctttttccttagagtctactccctgttccgttgcaaataagcccctgagctctgtcacattctagcctcgactccttggcctcgggaggagttcgtcgtagatccgatctagagagcctccccgcaccacccatgtttaccttccccttcctctgacggccgccgccccccgatgaagctgcgcgttcgctgccgctcccactccttctccgtcgccttcctctactggttctacgacttctcatgaactcctcgcccctcgagaccgccgcatatccatccagattctagttgatttgtagatctagctttgttcctccccctttctggccttcttccttcccaccatcacagaaaagagaaattttttccggttctgggatcgagaacccgaccatgtcgtcgccatcgcgccggagctccatcccggagagcaacatcgacggcggcagcggcagcggctccgccgggcgacgagcgcaagcgcaagaggatgctctccaacagggagtcggcgaggcggtcccgcgcgcgcaagcagcagcggatggaggagctcatcgccgaggccagccgcctccaggcggagaacgagcgcgtggaggcccagatcggcgcctacacgaccgagctgagcaaggtggacggcgagaacgccgtgctccgcgcgcgccacggcgagctcgccgggcggctgcaggcgctcagcggcgtcctggagatcttccaggtggccggcgcgcccgttgacatcccagagatccccgacccgctgctccgcccgtggcagtccccgttcgcgccccagctggccaccgccggcggcatgccggacgcgttccaattctgagccaagagccgccaagacatgtcatgccactgcattggaccaccatggatatggttgctgctcatctactgctgctgaagaatactactagtactactagtttgtttggttcatgtttaattatgtttgattcgtgttgggtatggtaatcctagaccattattagtacttatttcgtgattgtaatcttgcctatcgtgtcctgtgctcctacccactggatatggataagaacaatgtcattgatgtgtggcggagcacaaatggattgtgcctatctttggggtgattcgtaataacat

SEQ ID NO: 4300 - DNA, 1067 bp, Triticum aestivum
cgcagattcgatctagagagcctccccgcaccacccatgtttaccctccccttcctctgacggccgccgtcccccgatgaagctgcgcgtccgctgccgctcccactccttctccgtcgccttcctctactggttctacgacttctcatgaactcctcgccccccgacaacgccgcatccatccagcctctagttgattagatccagcctcgtttcttccactttcttgccttcttcctccccaccatcaaagaaaagagatctcttttctggttcttggatcaagaacccgaccgaccatgtcgtcgccgtcgcgccggagctccagccccgagagcaacatcgacggcggcagcggcagcggctccgccggtgacgagcgcaagcgcaagaggatgctgtccaacagggagtcggcgaggcggtcccgcgctcgcaagcagcagcggatggaggagctcatcgccgaggccagccgcctccaggccgagaacaagcgcgtggaggcccagatcggcgcctacacgaccgagctgaccaaggtggacggcgagaacgccgtgctccgcgcgcgccacggcgagctcgccggccggctgcaggcgctcggcggcgtcctggagatcttccaggtggccggcgcgcccgtggacatcccggagatccctgacccgctgctccgcccatggcagtccccgttcgcgccccagctggccaccgccggcggcatgcctgacgcgttccagttctgagccaagacaagtcatgccacggcgacattgcgccaccgtggataaggttgatgattactgctgctgctgctgaagaatgctagtactactagtttgtttgcttcatgtttaattatggtaatcctagaccatcattagtacttattttgtgattgtaatcttcctattgtcctagccagtggatatggataagaacaatgtcattgatgtgtggcggagcacaaatggattgtgcctatctttgggttgatttgtaataacatcttgacatggaacctatatatgtttgcagttatttagctatctgttactttg

SEQ ID NO: 4301 - DNA, 839 bp, Triticum aestivum
attcgccaggctctgctgggaatgcgcactgagaaagctcagcttatgcttcttcgggagatagcacaacagttagccaaagacgccgctccagttggcactggggctgggtctgttccagttgtccaccatttgcccagaaagcaagctgtgggggtcgcagatacaacggtcagggaagacaagaagacagcacccgccgggacattctccaagcccttgttgtttaagtgggccatcgcattattttgctctcgaaaaaagaagccatcacaaagcaggtatacatttggattatcaagtaacaatgtgggtttgctcatactcttggacaagtgccctcggattcagaaaactctcatgagaagaaagtaaagcctgtctgaagaagctgctgctgcctaatgtaaataacatagccgttggttgggaagtctgcatcaaatcacattttcttattcaagggttgggagatggtgttgttttaattctttagttgttgatgatttctctttggccccaggaggggatggggatccttgtgccatgatccagaaattgtcaatgtgggttttggggggttgcttttgcttatattttctcaccagcaaaggctatatgcttgtatagtgcgcgtgtgaacgtgcggtgactgctggttgtttttgcttgctttcagattgatgacggatgagttgatatcaaggaaattagctgcacatttgtgcaaactgtatctgatgtgtcttttttgtcagtacagaatctgttggcgtggttgatttggtgtgtacacatgtgtgaagctatcatgtcatcttgggagaaaagcacgcttc

SEQ ID NO: 4302 - DNA, 677 bp, Triticum aestivum
gccgccgggggacaaccccccggtcacgtacccgtcgcctccggtgaacacgccatgccctcctccgcctccgcgacgcccgcggcgcagacgtgcccggtggactcgctgaagatcggcgcgtgcgtggacctgctgggcgggctggtgcacgtgggcctcggcgacccggtggtgaacaagtgctgcccgctgctggaggggctggtggagctggaggcggcggtgtgcctctgcaccaccatccggctcaagctcctcaacatcaacctcgtcctgcccctcgccctccagctcctcctcacctgcggcaagacccctccccccggctacacctgctccatctgatcgagctaagctcggtaagtcggtgcacgtggagatggtggatcatggatggatcgacatgagaggatgtcgaacgtggtcgtagtacgtagcgagcaagaagaagagattgatcgatcagctatgaagggatcgatgagtacgcgtttgtttttcttcatttcttgtggtttcctttttgtgtttggttattaggtcaggtctgtgtgctctggtttggccgatgcaagaggtgataatcggtgtgtttactgattaattaattgtgtggtcacagactcacagctgatggccaattggttaagctagcagacacctagtactatcag

SEQ ID NO: 4303 - DNA, 1097 bp, Triticum aestivum
ggttttgcttcgcttgctcggattgcaggagggtatgagagacgaaaacaacagctagaggatagctcagattaagctctttcatcaaggatagaatgggtggctgctgctgttgtgcatcaagagcggaagcggatagagcaccggttcacatctatcatcagcaaaaccaagaggagcatgaacctttatcttctgcctttgacgggtcatctccagcttctgctatagtcgcagttgacacaaatctggacacatccactcctgacacttatcgggcaccacctgcaccattgccttatgatgttagtttgccagttacagaaaacccagatctggagaagtcagatatcaaaagcaaaacagatgatcagcaggaatctctgaaggtggatgaatacgaatcatgtgaaaaaggtgcccctgaagataagatcgaggaggaggatgtttgccctatctgccttgaagaatatgatgaagaaaatccccgctctatcaccaaatgcgagcatcatttccatctttgttgcatactcgaatggatggagcgaagcgagacttgcccagtctgtgaccagataactttgatagatgagatgtatgaatagcatgttgaccctggtggatcctctctaggagcccgtgcgtgcctaccgaggaggtttagtactagtccttttctctatggggaagtaaaatcagcaaactactctgctcctaatatgatagtatgatctggtggaggaggtgctactggaatgcatcttgggagaacaaatgggaaataatgaaaggaaggaacccgcaagaaatatgctctaaaaaaaaccatccatccctgtgtttatactagcatttgtgtcaagtttatggtaacaggaggattagcaggctgcatctgcaatatgcacttcatactagtcgaaactctgaatccagctctctttatttttcgtgctttctggattttgggttgcgtttttctgattcgtcgagcgtctgtataaaccatcgcatactagatatagggtgacagcaagtataaaagactggttctgaactgtgtcttcatttgtacattacttaccggtgat

SEQ ID NO: 4304 - DNA, 764 bp, Triticum aestivum
  N_region (71)..(71): n = any nucleotide
ccattgccttatgatgttagtttgccagttaccagaaaacccagatctggagaagtcagatatcaaaagcnaaacagatgatcagcaggaatctctgaaggtggatgaatacgaatcatgtgaaaaaggtgcccctgaagataagatcgaggaggaggatgtttgccctatctgccttgaagaatatgatgaagaaaatccccgctctatcaccaaatgcgagcatcatttccatctttgttgcatactcgaatggatagagcgaagcgagacttgcccagtctgtgaccagataactttgatagatgagatgtatgaatagcatgttgaccctggtggatcttctctaggagctcgtgtgtgcctgccgaggaggtttagtactagtccttttcctatggggaagtaaaatcagcaactactctgctcctaatatggtagtatgatctggtggaggtgctactggaatgcatcttgggagaacaaatgggaaataatgaaaaacacaagcatcaagaaatatgttacctaaaaaaacatccatccctatgtttatactagcatttgtgtcgagctgtggctgtttatggtaacaggaggattagctggctgcatctgcaacatgcacttcatactagtcgaaactctgaatctagctctctttttttcatgctttctggattttgggtcatgttttctgtgattcgtcgagcgtctgtataaaccatcacatacttactagatatagggtgacagcaagtata

SEQ ID NO: 4305 - DNA, 710 bp, Triticum aestivum
cacatgggataccaagctatcgcaggctgagttcacacaccctgatgagcttgatgaggagtttgacacattcccatccaacaggccagctgacattgtaaggttgcgctacgacaggctgaggagtgttggaggtcgtgtgcagacggtggtcggggacctggcgacgcaaggtgagagagcccatgcgttgctgagctggagggacccccgtgccaccgccatcttcatattcttgtccctggtggtggccattgtgctgtatgtgacgccgttccaggttttgctggtcatcaccatgctctacttgctgcgccatccccggttccgcagcaggatgccctctgtcccgttcaacttctacagaagattgcctgccaagtccgattcgcttatttgaagataaaatgagggaagcttgtaacattgcccccctctctcgttctgttccttctggttagcatcagatcagatgtgaatatacttaatgagttgattaatttagagccaggcagctggtggccctgtaataaggtgtcggtttatatgttggtctgcttagctaggcagaaaacgaagggaatggccgggggatcccttcgtagttttggatggaaaatgttggctttggggtttctggtgtagagctgggcacaagttgagttccagaatgttatgtttatgtattggtgccagttttgtttatgttc

SEQ ID NO: 4306 - DNA, 833 bp, Triticum aestivum
ctaccatcttcctctacatgtttatgatcggactgtggaactatcgcttccggtcaaggcacccaccacacatggatactaagctatcgcaggctgagttcacacaccctgatgagcttgatgaggagtttgacacattcccatccaacaggccagctgacattgtaaggttgcgctacgacaggctgaggagtgttggaggccgtgtgcagacggtggtcggggaccttgcgacgcaaggtgagagagcccatgcgctgctgagctggagggacccccgtgccacagccatcttcatattcttgtcctggtggtggccattgtgctgtatgtgacgccgttccaggttttgctggtcatcactatgctctacttgctgcgccatccccggttccgcagcaggatgccctctgtcccgttcaacttctacagaagattgcccgccaagtccgattcgcttatttgaggccagagcattcgacagaagataaaatgggggaaccttgtaacattgtcctcctctctcattctgttccttctggttagcatcagatcagatgtgaatatacttgatgagttgattaatttagaggcagctggtggccctgtaatatggtgtcggtttatatgttggtctgcttagctaggcagaaaacgaagggaatgaccgggggttcccttcatagttttggatgaaaaatgttggctttgggatttctggtgtagagctgggcacaggatgagttccagaatgttatgtttatgtattggtgccagttttgttgatgttctgttaattccgttgcgtcgatcatgttcctgccctaatcttt

SEQ ID NO: 4307 - DNA, 615 bp, Triticum aestivum
gtcatgaacgtcaacttcggcgcatcaccgttatgaccaacgagcagctcctggagttcgcgtgggggcttggccaagagcggcaatcattttctctggatcatccgtcccgacctcgtcaagggcgacaccgcagtgctccccccggagttctcggccgagacggtggagcgtgggctcgtggcctcctggtgcccgcagcagcaggtgctgaaccacccggccgtgggcgcgttcctgacgcacagcggctggaactcgacgctggagagcatatgcggcggcgtgcccgtcatcagctggccattcttcgcggaccagcagaccaactgccggtaccagtgcaaggaatggggagtcggcatggagatcgacaccgacgtccggcgcgacgccgtcgcagaccttatcactgagctcatggagggggagaatggaaaggtgatgaagaagaaggcacaggagtggagggagaaagcggtgagggcgaccaagcccggcggtcgtctcaccgcaactttgatgcgttgattcagacgtgttgctcctataccgctttgtggtatgtgtacttgtttttaatttttttttttctgaatcccttcttaaacggat

SEQ ID NO: 4308 - DNA, 998 bp, Triticum aestivum
tcttctgaggttatttgatttgggtggttatcctccaacctcaacctatgtattcctcggagactacgtagatagaggcaaacagagcttggaaactatatgcttactgctggcatacaaaataaggtaccctgacaagattttcctgttaagggggaaccatgaagatgcaaaaatcaacagagtttatggtttctatgatgaatgcaagaggagattcaatgttcgtctgtggaagatattctctgattgcttcaactgcctgcctattgcagcactcattgatgacaagatactgtgcatgcatggtggcctttcacctgaactgactaacctcgaccaaataaaggatattgagaggccggctgagattcctgattatggtctcctgtgtgatttgctttggtctgatcctagccctgacggagaagggtggggggagagtgacagaggtgtttcatgtacgtttggtgcagataagcttatagaatttttggaaaaaaatgatcttgatcttatctgccgagcccatcaggtggtagaagatggttacgagttcttcgcacagcggagattagtcacaatcttctcagctccaaattattgtggggaattcgataatgtaggtgctctgttgagcatagatgaaaatctaatgtgctcatttcaaatcttgaagccaaatgaaacaggcacaccgcgtgtgaaaagacaaatcccaaataagccagcaattgggggaagtgcctgatctgataaacatccaattccttcaatattaccattgtcagctcgaagggggtgatctgatctattgtttggatccaccagggcatggcaatattcatccaccagccaattgtcttgcttaaccacccttagttgccgagcatttgtaaatgtccattggctctgcacttgttttctcatgtacagaattaggccggatttaacagcaccacctattactggttgatattgctttgcgactggcatct

SEQ ID NO: 4309 - DNA, 838 bp, Triticum aestivum
  N_region (16)..(16): n = any nucleotide
  N_region (85)..(85): n = any nucleotide
  N_region (88)..(88): n = any nucleotide
  N_region (107)..(107): n = any nucleotide
actacaagtccgtgantaagcccagtttgggcagaagggaccgggtaccgcaacttgctggatatgaatgcgcggctttggcggnttngctgcggcattggcgggtnaccctatgtgggtgatgaacatggtcccaaccgttggaaattcaaccacccttggggtgatatacgagcgcggcctcattggaaactaccaagactggtgcgagggcatgtccacctatccccggacctacgacctcatccatgctgattcggttttcagtctgtacaaggacaggtgtgagatggacgccatcctgctggaaatggacaggatcctgaggccggagggcacggtgatcatcagggacgacgtggacctgctagtgaagataaagagcgtcgcggacgggatgagatggaatagccagatcgtggaccacgaagatggtccgctcgtccgggagaagctcctccttgttgtgaagacatactggacactcggggacgagaaacaatagcagcaccccgaaataaaagcatgagaaatgagaaaatcgacagatactgggcagatgccacacacatccggcttcctctcaccgtgttcgccctgtggttttgaagtttcatcttgtttgggtagttcgtttggtgaaatagtgaaacatagtggagacatgcccacgtctgttcacagagggcaagcctgccaagattttgacatggggaaggacagccagccagccaaatggggttgacagagatttcattgtgtttcttgctgtacaaagtgttggttatgtgtaagttcccctcggctgttctgccctccttactgaatcagacccaag

SEQ ID NO: 4310 - DNA, 954 bp, Triticum aestivum
cggcggtgagctgaagaagtggccgcagaggctcaccgccatgccacccaggattgctagtggcagtattgagggggtcactgccgaaatgtttaacgaagacaccaggttatggaagaagagagttgggcactacaagtccgtgataagccagtttgggcagaaggaccggtaccgcaacttgctggatatgaatgcacgctttggcggcttcgctgcggcattggcgggtgaccctatgtgggtgatgaacatggtcccaaccattggaaattcaacgactcttggggtgatatatgagcgtggcctcattggaaactaccaagactggtgcgagggcatgtcgacctatccccggacctacgacctcattcatgctgattcagttttcagtctgtacaaggacaggtgcgagatggacaccatcctgctggaaatggacagaatcctgaggccggagggcacggtgatcatcagggacgacgtggacctgctagtgaagataaagagcgtcgcggacgggatgagatggaatagccagatcgtggaccacgaagatggtccgctcgtccgggagaagctcctccttgttgtgaagacatactggacactcggggacgagaaacaatagcaacgccccgaaataagcatgagaaattgacagatactgggcaaatatcacaactggcttcctctcaccgtgttcgccctatggttttgaagttttatcttgtctgggtaattcttttgctgaaatagttaaacatggcggagacatgcccaagcctgttcacagagggcaagactgccaagattttgacatggggaagggcagccagccaaatggggtagacagagatttcgttgtgtttcttcctgtacaaagagttggtcatgtataagttcccctcggctgttctgtcttccttactgaatcagacccaagaatgataa

SEQ ID NO: 4311 - DNA, 999 bp, Triticum aestivum
cactgccgtgccacccagaattgccagtggcagtattgagggggtcactgccgaaatgtttaacgaagataccaagttatggaagaagagagttgggcactacaagtccgtgataagccagtttgggcagaaggaccggtaccgcaacttgctcgatatgaatgcgcgctttggcggcttcactgcggcattggcgggtgaccctatgtgggtcatgaacatggtcccaaccgttggaaattcaacgacccttggggtgatatacgagcgtggcctcattggaaactaccaagactggtgcgagggcatgtccacctatccccggacctacgacctcattcatgctgattcagttttcagtctgtacaaggacaggtgcgagatggacaccatcctgctggaaatggacagaatcctgaggccggagggcacggtgatcatcagggacgacgtggacctgctagtgaagataaagagcgtcgcggacgggatgagatggaatagccagatcgtggaccacgaagacggtccgctcgtccgggagaagctcctccttgttgtgaagacatactggacactcggggacgagaaacaataggaacgccccgaaataaagcatgagaaatgagaaaattgacagatactgggcagatgtcacacacatctggcttcctctcaccgtgttcgccctgtggttttgaagttttatcttgtttgggtagttcgtttggtgaaatagctaaacatagtggagacattttttttagaaaagggggactccccggcctctgcatcagaacgatgcatacggccacaacatagtggagacatgcccaagtctgttaacagagggcaagcctgccaagattttgacatggggaaggacagccagccaaatggggtagacagagatttcattgtgttccttcctgtacaaagagttggttatgtgtaagttcccctcggctgttctgtcttccttactgaatcagacccaag

SEQ ID NO: 4312 - DNA, 553 bp, Triticum aestivum
cttcctttcgtcttcagccgtagcaagcagtacgagtggaatgctagaacacaggtgacaatgtggtacgacgacacaaagatcgagcagagcaaactccatgactacgccaataaattctggagtgggcttctgaagagctactaccttccaagggcatctaaatacttcactcggttatcgagaagcctccaagagaaccggagctttcaactggaggaatggaggcgagattggatctcctactctaacgaatggcagtccgggaaggagctgtaccctgtgaaagccacgggtgatgctttggcgatctccaggtctctctttgcaaagtacttcaggtaaggtagatgtgggctgcggccacaaaactttgaggaatgtttgttataaataaagcaaaataatgtacgcatgagatcgttgtgaagtgagcggtgtacatccgctctcgattccgcaactagtcccgtttcaagtaaaaggttcagccgtcaatactgtactttttgcagtgggtacatcgaataacgaaattgaaacctttcatgcg

SEQ ID NO: 4313 - DNA, 621 bp, Triticum aestivum
actttcacacaaagaaattcctccgaagtcatcatggatatcgaagacgctactagcttctgatgacaatttcctgctgggcccttggttagaaactgcaaaaagccttgctacgactgaagacgaaaggaacagtacgaatggaatgctagaacacaggtgacaatgtggtacgacgacacaaagaccgagcagagcaactccatgactacgccaataaattctggagcgggcttctgaagagctactaccatccaagggcatctaaatacttcactcggttgtcgagaagcctccaagagaaccggagttttcaactggaggaatggaggcgagactggatctcgtactctaacgaatggcagtccgggaaggagctgtaccctgtaaaagccacgggtgatgccttggcgatctccaggtctctctttgcaaagtacttcaggtagatgtgggctgcggccacaaaactatgaggagtgtttgttataaataaagcaaaataatgtactgcatgagatgttgtgaagcaaacggcgtacatctgctcttgactctgcaactagtctcatctcatgtaaaaggttcagccgtcaatacttttcgcgctgggaaataaat

SEQ ID NO: 4314 - DNA, 620 bp, Triticum aestivum
gcctggagccgccatgaaggacctcgcctccatcaccggccagtaccccgtcaagaccaaggccaagaactccgtcgccagcttcaagatccgcgagggcaacaccattggtatcgccgtcacgctccgcggcagggtgatgttcaacttcttggataggctcatcaaccttgggctccctaggaccatggacttcctaggtgtcaaccccaacagcttcgacggccacggcaactacaccatcggcctccgcgaccagggcgtgttcccggagattccctatgaggtgggcggcaagaagaacggtatggacgtcaccattgtgaccaccgccaagaccgacaacgaggcgcaaaggctgctcgcgctcctcggcatgccattcgccgagaacatcaagtctgatcagttcaagaagaagaggttgaagcgccaccacttcatgagcaagggcaggggaagaaagtgaagatcgagcggcgtttgagctttgcttcccactttgtcaattgtgatccttttgcatagtttggtttagatatttgatgatcctttcgctgtctgttataacttgcagttcatgttgtacctactgccacagaacaaaatggaaatttttg

SEQ ID NO: 4315 - DNA, 694 bp, Triticum aestivum
ccagtgcccaagcttgagagattgtggtgaactccgagcttggggtgattcgggaacaacaaggttctggagccgccatgaaggacctcgcctccatcaccggccagtaccccgtcaagaccaagccaagaactccgtcgccagtttcaagatccgcgagggcaacaccattggtatcgccgtcacgctccgcggcagggtcatgttcaacttcttggataggctcatcaaccttgggctccctaggaccatggacttcctaggtgtcaaccccaacagcttcgatggccacggcaactacaccattggcctccgcgaccagggcgtgttcccggagatcccctacgaggtgggcggtaagaagaacggtatggacgtcaccattgtgaccaccgccaagaccgacacgaggcacagaggctgctcgcgctcctcggcatgccattcgccgagaacatcaagtcggaccagttcaagaagaagaggttgaagcgccatcacttcatgagcaagggcaggggaagaaagtgaagatcaggcggcgtttgagctttgttgcttcccactttgtcattgtcatccttttgcatagtttggtttagatattggatatctgatgatccttttgctgcctgttattacttgctcttatattagtttacagagggagtactacagaacaaatggaaagttt

SEQ ID NO: 4316 - DNA, 616 bp, Triticum aestivum
ccgccaccccctccggcatcatcctcgtcgacccgccgaggcccagaaggtgcaccgcctcaagaccgtctacgacaccaaggtcatccccgtcatcaccgaggagttcggctacaccaatgtccaaccaggtgcccaagctggagaagattgtggtgaactgcgggctggggggtggatgcggggaacaacaagggcctggaggccgccatgaaggacctcgcctccatcaccggccagtaccccgtcaagaccaaggccaagaactccgtcgccagcttcaagatccgcgagggcaacaccattggtatcgccgtcacgctccgcggcagggtgatgttcaacttcctggataggctcatcaaccttgggctccctaggaccatggacttcctaggtgtcaaccccaacagcttcgacgggcacggcaactacaccatcggcctccgcgaccagggcgtgttcccggagatcccctacgaggtgggcggcaagaagaacggtatggacgtcaccattgtcaccaccgccaagaccgacaacgaggcgcagaggctcctcgcgctcctcggcatgccattcgccgagaacatcaagtcggaccagttcaagaaga

SEQ ID NO: 4317 - DNA, 968 bp, Triticum aestivum
cttcaacctggcaaagtgaaggatgtctggctgaagcttgtaaaagatttggagattcaaagagacaggaaagatcgtggtcaggtgcaccttgagctagtctattatccatataacatgaaggatgagactccaaatccttttaaacaacatttttcgatgacttccttagagaggacaatgacaactaatggaaatggatcagcgagcaaagattatggcaggttgtcatcaaggaagagaaaggaaattatcctgcgaggggttctccaagtaactgtgatatctggtgaagatctgccagcaatggatatgaatgggaagtctgacccatatgttgtagtttctctcaagaaaacaaaaaccaagcacaagacaagggttgtgaatgaaagcttgaaccctgtttggaatcaaacttttgacttcgttgtcgaagatggcttacatgacatgctcatgctggaagtttatgatcacgacactttcagtagagattacatggggcggtgcatcctgaccttaactaaggttttgatcgaagaggattacaccgacagcttcccgttgcagggagcaaagaccgggaggctgaagttgcatctgaagtggtcgccgcaatcaatcatgcgtgattcgggagaagcagcttaactttcagaccattcaagtatatgcgcctctggtttcagtgggtggatattgggctgactgttggccatgcttggctttcttttctgaaaacaagctggggttcggtcatcatttttcaggtgtaaattgtctccatcgtttcgtcgcagcagagtgtcatggtgtcgatagattgaattctgcaatggcagtgacagtgaccaaaccgtgtttaaattccttgtaacggcatgcttcaaagcgcgtctgtaaatgcagtagaaacaaattcagctattgtggacaatcgtgggtatcactcatgaggatcaatc

SEQ ID NO: 4318 - DNA, 1274 bp, Triticum aestivum
  N_region (1247)..(1247): n = any nucleotide
atctggaactgaagcctgttggcacattggaagtcaagcttgtgcaagcaagagatttgacaaacaaggatctgataggaaaatcggatccttttggccacgtttatatatccgaccattgcgcagacggaaccgagagaagtagaaacaattaacaatgatctcgatcccatttggaatggacactttgagtttattgttgaagatgctgatactcagagcgtgacagtcaagatttatgacgatgacggtattcaggaatctgatctgattggctgtgctcaagttagcctgaaggatcttcaacctggcaaagtgaaggatgtctggctgaagcttgtaaaagatttggagattcaaagagacaggaaagatcgtggtcaggtgcaccttgagctagtttactatccatataacatgaaggatgagactccaaatccttttaaacagcatttttcgatgacttccttagagaggacaatgacaagtaatggaaatggatcagcaagcaaagattatggcaggttgtcatcaaggaagagaaaggaagttatcctgcgaggggttctccaagtaactgtgatatctggtgaagatctgccagcaatggatatgaatggaaagtctgacccatatgttgtagtttctctcaagaaaacaaaaaccaagcacaagacaagggttgtgaatgaaagcttgaacccagtttggaatcaaacttttgacttcgttgtcgaagatggcttacatgacatgctcatgctggaagtttatgaccatgacactttcagcagagattacatgggacggtgcatcctgaccttgacaaaggttttgatcgaagaggaatacaccgatagcttcccattgcagggagcaaagactgggaagctgaagttgcatctgaagtggtcgccacaatcgatcatgcgtgattcgggagaagcagcttaactctcagaccatccttgtttgcgcgcacatatgtgtgcctctggtttcagtgggtggatattgggttgactgttggccacggttggctttctttttgaaaacaagctggggttcagtcaatcatttttcaggtgtaaatgttttcccatcgtttcgtcgcggcgcagattcatggcgtcgatagattgaattctgtaatggcagtgacagtgatcaaacagtgtttaatttccttattgtaacgccatgcttcaaagcgcgtctgtaaatgcagtagaaacaaattcagctcntgggggtaatccgtggatgctttatca

SEQ ID NO: 4319 - DNA, 714 bp, Triticum aestivum
cgcaaatgttacagttgcgtcagttgaggataccctgcaaatcgtgacccggcgtcacaaagtttaatctgatagctgacatgatgttggacgaagctgctaaaatggaatttgatctgattgtcatgccgggcggtctgtcgggtgctcaaaagtttgctagtacagacaaacttgttgatttactaaagaagcaggcaggatctggtaaagcctatggtgcaatatgtgcttccccagctcatgtcctcgagccccacggtttactgaaggggaagaaggcgacggcgtttccacccatggcgcacttgcttactgatcggagcctatgtgagaacagggttgtgattgacggtaatcttatcactagcagagccccagggactgcgacggagttcgccctggccattgttgagaagctatttggtcgagagaaagcggtcagtgtagctaaggagtttgtttttatgtgatcacaacctgagttggtgctgtgtgcagtgcaaagtgcaaaactgtggataaccacacctctgtgtacataatgccctgcactggtaggaactgcttgtgcatctgatggaactatagaagcataccttaaacagagaggtgaatgtacaccataatttccatgtacatacggagttatcatcttagcttcgtcgaggaactgagaaactgcagtaagtcatactatcaattgttaataag

SEQ ID NO: 4320 - DNA, 699 bp, Triticum aestivum
tgcaaatcgtgacccggcgtcacaagtgttatctgatactgacatgatgttggacgaactgctaaaaatggaatttgatctgattgtcatccggcgatcttcgggtgctcaaagtttgctagtacagacaacttgttgatctactgaaaaagcaggcaggatctggtaaaccctatggtgcaatatgtgcttccccagctcatgtcctcgagccccacggtttactgaaggggaagaaggcgacggcatttccacccatggcgcacctgcttacagaccagagcctatgtgagaacagggttgtgattgacgggaatcttatcactagcagagccccagggactgcgacagagttcgccctggccattgttgagaagctatttggtcgagagaaagcagtcagtatagcgaaggagtttgtttttatgtgatcacaagctgagttggtgctgtgtgcagtgcaagtgcaactctgtggttaaccccgcctctgtgtagataatgcctgcactggtaggaactgtgtgtacatttgctggaactatagaagcataccgtaaacagagaggtgaatgtacagcatattttccgtgtgcaactggaggtatcatcttagcttcgtcggggaaaagctgagaaactgcagtaagtcccactttcattgttaataagctgtttggtcaagaaaatccgttcgcc

SEQ ID NO: 4321 - DNA, 844 bp, Triticum aestivum
ttgcgtccagttgaggataccccggcaaagttgtgaccgcggcgttcacaaagttaaatctgatacctgacatgatgttggacgaagctgctaaaatggaattttgatctgattgtcatgccggccggtctgtcgggtgctcaaaagtttgctagtacaaacaaacttgttgatttgctgaagaagcaggcaggatctggtaaaccctatggtgcaatatgtgcttccccagctcatgttctcgagccccacggtttactgaaggggaagaaggcgacggcatttccacccatggcgcacctgcttacagaccagagcctatgtgagaacagggttgtgattgacgggaatcttatcactagcagagccccagggactgcgacagagttcgccctggccattgttgagaagctatttggtcgagagaaagcagtcagtatagcgaaggagtttgtttttatgtgatcacaagctgagttggtgctgtgtgcagtgcaaagtgcaaactctgtggataaccccgcctctgtgtagataatgcctgcgctggtaggaactgcgtgtacatttgctggaactatagaagcataccgtaaacagagaggtgaatgtacagcatattttccgtgcgcaactggagctatcatcttagcttcgtcgaggaaaaactgagaaactgcagtaagtcccaatttcaattgttaataagctgtttggtcaagagaatccgttcgccccgcgttgctaaaacgtcgctgttttgcggtgcattgcagtcgtctgttcttaacaccagtgtacctgtgactgtagttcatctctttgttttgtttaacatggtgag

SEQ ID NO: 4322 - DNA, 662 bp, Triticum aestivum
cgcctggcgcaccggatcacggcggcgccgacgcgctcctcatgccctcccggttcgagccgtgcgggctgaaccagctctacgccatggcctacggcaccgtccccgtcgtgcacgccgtcggcgggctgagggacaccgtgccgccgttcgaccccttcaaccactccggcctcgggtggacgttcgaccgcgccgaggcgcacaagctgatcgaggcgctcgggcactgcctccgcacctaccgggactacaaggagagctggaggggcctccaggagcgcggcatgtcgcaggacttcagctgggagcatgccgccaagctctacgaggacgtcctcctcaaggccaagtaccagtggtgaacgctagctgctagccgctccagccccgcatgcgtgcatgcatgagagggtggaactgcgcattgcgcccgcaggaacgtgccatccttctcgatgggagcgccggcatccgcgaggtgcagtgacatgagaggtgtgtgtggttgagacgctgattccgatctcgatctggtccgtagcagagtagagcggacgtagggaagcgctccttgttgcaggtatatgggaatgttgtcaacttggtattgtagtttgctatgttgtatgcgttattacaatgttgttacttattcttaa

SEQ ID NO: 4323 - DNA, 1110 bp, Triticum aestivum
gtgggtggtgaacacgccaactacttcgccgccggcctgaagatggcggaccaggttgtcgtcgtgagcccggggtacctgtgggagctgaagacggtggagggcggctgggggcttcacgacatcatacggcagaacgactggaagacccgcggcatcgtgaacggcatcgacaacatggagtggaaccccgaggtggacgtccacctcaagtcggacggctacaccaacttctccctggggacgctggactccggcaagcggcagtgcaaggaggccctgcagcgggagctgggcctgcaggtccgcggcgacgtgccgctgctcggcttcatcgggcgcctggacgggcagaagggcgtggagatcatcgcggacgcgatgccctggatcgtgagccaggacgtgcagctggtcatgctgggcaccgggcgccacgacctggagggcatgctgcggcacttcgagcgggagcaccacgacaaggtgcgcgggtgggtggggttctccgtgcggctggcgcaccggatcacggccggcgccgacgcgctcctcatgccctcccggttcgagccgtgcggactgaaccagctctacgccatggcctacggcaccgtccccgtcgtgcatgccgtcggcggcctgagggacaccgtgccgccgttcgaccccttcaaccactccgggctcgggtggacgttcgaccgcgcagaggcgcagaagctgatcgaggcgctcgggcactgcctccgcacctaccgggactacaaggagagctggagggggctccaggagcgcggcatgtcgcaggacttcagctgggagcatgccgccaagctctacgaggacgtcctcgtcaaggccaagtaccagtggtgaacgctagctgctagccggtccagccccgcatgcgtgcatgacaggatggaattgcgcattgcgcacgcaggaatgtgccatggagcgccggcatccgcgaagtacagtgacatgaggtgtgtgtggttgagacgctgattccgatctggtccgtagcagagtagagcggaggtagggaagcgctccttgttacaggtatatgggaatgttgttaacttggtattgtaattt

SEQ ID NO: 4324 - DNA, 632 bp, Triticum aestivum
gtgcgcctggcgcaccggatcacggccggggccggacgcgctcctcatgccctcccggttcgagccgtgcgggctgaaccagctctacgccatggcctacggcaccgtccccgtcgtgcacgccgtcggcggcctcagggacaccgtgccgccgttcgaccccttcaaccactccgggctcgggtggacgttcgaccgcgccgaggcgcacaagctgatcgaggcgctcgggcactgcctccgcacctaccgagacttcaaggagagctggagggccctccaggagcgcggcatgtcgcaggacttcagctgggagcacgccgccaagctctacgaggacgtcctcgtcaaggccaagtaccagtggtgaacgctagctgctagccgctccagccccgcatgcgtgcatgacaggatggaactgcattgcgcacgcaggaaagtgccatggagcgccggcatccgcgaagtacagtgacatgaggtgtgtgtggttgagacgctgattccaatccggcccgtagcagagtagagcggaggtatatgggaatcttaacttggtattgtaatttgttatgttgtgtgcattattacaatgttgttacttattcttgttaagtcggaggccaggg

SEQ ID NO: 4325 - DNA, 560 bp, Triticum aestivum
gacaggtccgatgtagctctcggtgtccatcagcaacgctagcgaccaagagagggaatgggttgaggaagaccagcctggtgtatatattaccatccgggctttgcctggtggcatcagagaactccgccgtgttcgattcagccgagagaagttcagcgagatgcacgcgaggctatggtgggaagagaaccgagcgaggatacatgaacagtacctctgagacagaagaagaagcacagatgaaaacaatactgagaacttcgccgttgacatgagccagccgtcgatccatgttgtacatttgcagtttgagctaacattaccccctctctggtgaaggcgtcttgagaaactgaactatactgatctgcaaggctctgattatgtggccatccacatgttctcatgcatggtttttggctttagattgcgcaggaacttcgttcgtgttgggtagctcgaaagggtgcgtactgtgtcattggcctagagataccatctgttctgaaactgtggcttgccaaaccattccccacctggaatgctggaattttttg

SEQ ID NO: 4326 - DNA, 1022 bp, Triticum aestivum
cgatgtcatagtgctgatgacgacttcacaactataataaacgttgcaggtgggtcgtccggtttacataaacatccagaagttcgtgcagtttcagttgactgtgaacattgttgctttggtgatcaaactttgtctcacgcgtgcatcacagggagtgctcctctcactgctgtgcagctgctgtgggtgaacatgattatggacacattaggggctttagctctggcaactgagcctccaaatgatgaaatgatgaagaggccgcctactggacgaggggaaagcttcatcaccaaggtcatgtggagaaacatcattgggcaaagtatataccagctggttgtgcttggcgttctcatgttcgccggggaaaatcttctgaacatcaagggtccagattccaagactgttctcaacacgctcatcttcaactccttcgtgttttgccaggtattcaacgaagtgaacagcagggaaatggagaagatcaacattttccgcggtctcatcggcaattgggtcttcctcggggtaataagcgcgacggtggtattccaggtggtgatcatcgagtttctcggcacttttgcaagtactgttccactcagctggcaattctggttggtgagcgtgggtctaggatccatcagcttgattattggagctatcttgaagtgcattcctgttaagtcaggtgaaatctctggaagtccaaatggttacaagccactcgccaacggccctgatgacatatagctggagaagggtgatttcaggatggatccaggctgcatttgctattttggttctgttgcatcgccagccgctaattttcttgaattcatttgtagtgcaagtgtgcgctgcaggattgctttttggtgctgcatttgtttgggaagtcaactccggcttgagaatcctattgctggatttggatttatttgcatttgaatgcagtgtaaagacttttttttgtctacgattttagcagtgatatgctagcaaaaataataaaa

SEQ ID NO: 4327 - DNA, 728 bp, Triticum aestivum
caccgaagctgttcaagtataaattggggccagacagagacgtcatcgatggatgcgtcaatgaggacgagttcattctgccagaagagtcgacaggtcacggtgagctctcagtgtccatcagcaacgcgagcgaccaagagagggaatgggttgaggaagaccagcctggtgtatatattaccatccgggctttgcctggtggcatcagagaactccgccgtgttcgattcagccgagagaagttcagcgagatgcatgcgaggctatggtgggaggagaatcgagcgaggatacatgaacagtacctctgagacaggagaagaagcacagatgaaaacaataccgaggactttgccgttgacatgagccagccgtggatccatgttgtacatttgcagtttgagctaacattactccctctctgggcagcgtgtgtgaggtgaaggcgtctacagaaactgaactatactgatctgctaggctctctctgattatgtggccatccaaatgttctcctgcatgggtttttagctttagattgcgcaggaacttcgtttgtgtcgggtagctcgaaagggtgcgtactgtgtcattaggctagagataccatctgttctgaaactgtggcttgccaaaatcaattccccacctggaatgctggaactttttgtgggttttcacctgaactgctgtcagcatgtcaaattctaagcaggccaaaaagt

SEQ ID NO: 4328 - DNA, 1111 bp, Triticum aestivum
cggcaaggaggacaacgccaaggagtgggtggcgcaggtggagcccggcgtctcatcaccttcgtcttcgctgccggaaggtggcaacgaacttaaaaggcttccgattcagctgtgagatgttcaacaaatggcaagcgcaaagatggtgggctgaaaactatgacaaagttatggaactttacaacgtgcagaggtttaatcatcaaagtgttcctctccctactactccaaagtctgaagatgagagctccaaggaggacagcccggtaacaccaccactggacaaggagcgagtacctcgttctttacagagaccaacatcggggggcggagcgatgggttactcttcatctgattctcttgagcaccattctaaccactactctaatggcctccaccatcaccacggacaccagtgctatgattcagtggggctggaatcgacaccaaagctgtcaagtataagtggggccaagacagaaacctcatcgatggatgcgtcaatgaggacgagttcatctccagaagaggtcgacagatccggtgagctctcggtgtccatcagcaacgcgagcgaccaagagagggaatgggttgaggaagaccagcctggtgtatatattaccatccgggctttgcctggtggcatcagagaactccgccgtgttcgattcagccgagagaagttcagcgagatgtacgctaggctatggtgggaagagaaccgagcgaggatacatgaacagtacctctgagacaggagaagaagaagcacagatgaaaacaataccggggacttcgccgttgacatgagccagccgtcgatccatgttgtacatttgcagtttgagctaacattactccctctgggcagcgtgtgtgaggtgaaggcctcgtcttgagaaactgaactatagtgatctgctaggctctcccagattatgtggccatccacatgctctcctgcacggtttttggctttagattgcgcaggaacttcgtttgtgtcgggtagctcgaaagggtgcgtactgtgtcattagcctagagataccatctgttctgaaactgtggcttgccaaaccattccccacctggaatgctggaa

SEQ ID NO: 4329 - DNA, 1117 bp, Triticum aestivum
acaagctgagggagatggagatgttcggggaggacggccgggatagggtttggacggtgatggcgaatgtgatggaacccgagagcctgcaccgggcgttcgacggctgcaccggtgtgttccacacctcggcgtttgtagatcccgggggcatgtccggctacacgaaacatatggctagcttggaagcccaagcagcggagcgggtgatcgaagcgtgcgtgaggacggaatccgtcaggaagtgcgtcttcacctcgtccttgctggcctgcgtgtggtggcagaaccatcctaatgaaagacggggcccgaccatcctggacgagaactgctggagcgacgagagcttctgccgcaacaacaagctatggtttgcacttgggaagacagcggcagagaaggacggctggagggcggaccgggggagagacctcaagctcgtcaccgtctgccccgcgctggtcacgggtgccggggtttcagccgcacgcaactctacggaatccatcgaagtaactcaaaggatctggtgtcatgctcgcggatggcgtcctggcgacggagaacgtggcgacggaggccgaggcccacgtccgggtgtacgaggcgatgggcgacaacacggccggcggcaggtacacatctgctacgaccatgtgatccggagagccgaggagttcgccgagctggagcggcagctcgggatcccgagaagaacggcggcaacgcagagcgtcgacgacgaccgtccagcgaggttcgagctctgcaaaaggaagctggggaggctcatgtcctcgaggaggaggtgcacgtacgatgactattactgccctgttacgttccaatagggcgccaagacaacgctgctggtggatttgaaggcagttaattctattgggttcgcgcggcaggtgacaattcaatcgagcaccgactcccctgggttgcacatgctgcttgaagaggtcaaaaccagaatgggagggggtggaaaaagagtagtagtgctttgattgtacattgtccctgtggacaaagaggagtagagacgtacgcgagtgcgatgatgtatatagggatagtgcgatcttgtaggttatttgacgcaaca

SEQ ID NO: 4330 - DNA, 988 bp, Triticum aestivum
ttgagtttgtacggaggcagataaaagaagtcactgatggatctgcccatgcgcaagagacagtccagaacagggaacaagctctcacactgttctttgtgggagaccaaaggggtgccgactcactggagaactggttgtgttacgaatggatttccagcgacttctattcatggtgatagaaaccagcaggaaagagaatatgctttgagatccttcaagagtggtcaaactccaattctagttgcaactgatgtggcggcccggggcctcgacattcctcatgttgctcatgttgtgaactttgatctccccaatgatattgatgactacgtacacaggattggtcgtacagggagggcaggaaaaagtggaattgcgactgctttctttaatgacaacaactcttcgatggcaaagtctctagctgacctaatgcaagaatctaatcaggaggtacctgcatggcttactcgctatgcagctcgcccatcctatggtggtggtggtggaaggaacagacgtggtgccggaggtgggagccgctttggtggccgtgacttccgtagggaatcttcttcctttggcaagggtgtggcgccagtgactatgtctggagcagcagctacggggtggtggctatggtggtgctggagctcccagtgcctgggattaatgttgcagttgttcgcttagggtctatcaagtttaggttgcttttattctagcttcttattagatatacatttttggcaggagctgagatgcagcgacagtatgagtgaactgtgtcgtccccttttcttctggttacaaccaaggtagtcttatcttcagatatccgttatggagagaatcttgaggactttcaagcacacaccgaggttcgcagttaggaataggatttctagagactgaaattccttgttagggataatagtagctggtgttggcagactgacagcgcttgatgtggaatttctctccg

SEQ ID NO: 4331 - DNA, 1131 bp, Triticum aestivum
ctgtcagccacttcaaggcaaggcgtccgagagttcttgactgaacttacagcaatttcagacatcaagcatgaaaacctcgtcacgcttgtcggctgctgtgctgaagggtcccataggatcctcgtttacaattatcttgagaaaaacagcctttcacagacattgctagggtctggctacagcagcatccagttcaactggagggctcgtgtcaaaattgccgtgggagttgcccgtggacttgcatttcttcatgaggaaatccgtcctcacattatccaccgcgacataaaagcgagcaacattcttctcgacaaggacctgaccccgaaaatttctgatttgggattggcgaggcttcttcctgccaatgcaactcatgttagcacccgggtggcaggcacattaggatacttggctccagaatatgctatccgaggtcaagtgactaagaagtctgacatctatagttatggggttcttctcttggaaattgtcagtggcagatgtaacaccaacacaagattgccttgtgaagatcaattcctccttgagaagacatgggcattctacgagcaagagcgtctagaagagatcatagatgccgacatagacgaagaccaggagatcgaggaggcatgccggttcctgaagatcggcctgctgtgcacacaggacgcaatggcacgccgtccccacatgcccaccgtcgtgaggatgctcacgggaagcaagagcatctccatggagaagatcaccaggccagccatgatcaccgactttgcggagctcaaggtcagcaccaagccgcacggagcgaaccaggcacggtccaacacatcgagatccttctccaccacggagatatcggagcccttctcgtcgtcggagaatcacacacagacatctgtatgaggagctggacaggaaattagcgccgttcgatttgtacattgtcgtggtgatagatatgcctgcatttttggaggatatattgctttgttttttgttttttttccttttttgattccacgaggaagggttgggttaatggggcacctgtcgtttgcttgttgtgtagtacgatgtgaatatctggagatggagatgatcaagataggctcttgc

SEQ ID NO: 4332 - DNA, 628 bp, Triticum aestivum
gttttgcttgcatggtacaattaattaagcctgtgtaactgatcaacgcggcatgtcaatactggcggaaggactgccacggaaggtggccgacccgttcgactatggaggtgggaacatcaacccttctagggcagcccatccaggactggtttacgacattaatccacgcaattacaacaaattcttccaatgtgcaatcatcaatcagaggacatcgacatccgtgggctgcaacgccacactactggcgtacaacctcaacttgccgtccatttcagttcccgacctgaggggtccgatcaccatcccaaggatggtgacaaatgtcggcgatgtccattcagtgtatcatgccatagtgcaaagcccagacggagtcaagatggaggttttcccacctgttcttgtgttcgacaatgcgaacaaagttcaaaagtttgatgtgaagctgtcacctatgtggaacttgcaaggggactacacgtttggcagtcttacttggcataacgacctacatactgtgaggattccagttgcggcccggattacaaatcaggatttctatgcggatgttgcataataaaatgtaaatcccatcacctcacttgcaataaaaatcagacct

SEQ ID NO: 4333 - DNA, 716 bp, Triticum aestivum
  N_region (574)..(574): n = any nucleotide
tctgctgcaatcaaatcagccatcatcactaccgcccatataacctgatgagcatcggcatgtcgatactggcggaaggtgctgcctcggaagattgtctgacccgttcgactacggatggctggcaacatcaaccctcatggggcggctgatccaggcctggtttacgtacattgatccacaagattacgataaatacttccgctgcaccatcgtcaagagggcctccgtgcactgcaatacgacgggaatgctaccggcgtaccacctgaacttgccgtccatctcggttcccaacctaagaagtccggtcaccatgtcaaggacagtgacaaacgttgggggtgtcgactccgtgtaccatgtagaaatccagagccctgtcggagtaaggatggaggttgatccgcctgttctagtgtttgatgcgaagaacaaggttcacacgtttcaagtgaaactatcccctgtgtggaagctacaaggggattacacttttggcagccttacatggggtaacgatcagaaggtggtgaggattccagttgcggcccggattacaattcaggatttntatgcggatgttgcatagttaattgggcgaaacatgcaaaacataagattatattacatgattgcatgattattcactttcacatgcacatgattattattatgtgtcaccgtgttgacgagagatgctactagtgaactta

SEQ ID NO: 4334 - DNA, 1934 bp, Triticum aestivum
taatcatcggagttgttgacaccgggatctggccggagtcaagaagcttcagcgatgtagggtacggaccggtgccagcgaggtggaaaggggagtgccagaccgggccggactggggcatcaacaactgcagccggaaaatcatcggcgcgcggttctacaccgctggggtccccgacgagtacctcaaaagggactcgctgtcaccgcgggaccactacagccacggcacccattgtgcttccaccgcagctggctcagccgtaggcgtggacggcgaggaggctagcttccacggccttgctgcgggggtggcgcggggaggcgcaccgcgcgctcgcatcgcggtgtacaagtccatctttgctggctacggtgattcagccactgtgctggccgccattgatgacgcaatccacgacggggtggatgtattgtcgctgtccctcactgtgccgtacgagaactcgtacggtgccctgcacgcggtccagaaggggatcactgtggtatactccgcgggaaacgacggacccaggccgcagaccgtcgaggatacctcgccttgggtcctcactgtagcggcgagcaagatcgaccgctcgttcccgacggtgatcacgttgggaaacaagcagcaaatggtgggccagtctctctattaccaagtgaagaacatcaactcatcatcacacacggctagaaatttcacaaagcttatatgtgcacaatcttgtgtgccgagacatgaggttcttcatcatattgacgtgaaaggggctatcctggtgtgcttaaatgataatgacgcgatcaatccatcagatgatttccaccatgcggcgaagtacgtggtggaaggcgggggatccgggctcatcttcgcgcaatacacaacggacaccctgagttccacagtggcttactgcccgggcatcgcctgcgttatcgtcgacatctacatctccaggaggatatgccaatacgcattcgactcaagctcgcccacagcaaaaatcgaacccacgcgcaccgtcatgagcaaagatgtgctggcttcgaaagtggcgtccttctcttcgagaggcccatcggctgattacccggccttcatcaagcctgacgtagctgcgcccggagccaacatcttagcagcagtgggagattcttacgtaactaagtcaggaacgtccatggcagccccgcatgcagcgggtgtcgccgcgctgctcaaagctctgcacccggattggtctcctgctgcaataaagtcagccatcgtcaccactgcgcatgtaactgatggacacggcatgccgatcctagcggaaggactaccgcggaaggtcgccgatccattcgactatggaggcgggaacatcaacccatgcggggcagctcatcccggcctaatttatgacattgatccacacgattacaacaaattctttcaatgcgccaatgtcaaggaggggatatctgcgatcgcaagctgcaacaccacctctatgccagagtataacctcaatctgccgtccatctcggttcccgattttaggagcgcgatcaccgtctcgaggacggtaaccaatgtcggcgagctccattctgtgtaccacgttgtagtccagagcccgactggagtcaatatggaggttttcccggatgttctggtgttcgatgctgcgaacaaagtccggaaattcgaggtgaagctgtcacctatctggaactttcaagggggctacacgtttggcagcatcacttggcagaatgaccgacaagtagtgaggattccagttgcgacccggattacgattcaggatttctatgcggatgttgcataatgataaaataaaaccacatctcatgcttaaaataaaatcaagacccacatgacacctactaggaagccatatcacctgacatgtggg

SEQ ID NO: 4335 - DNA, 1157 bp, Triticum aestivum
gtgatttcaagtcaagcaacatactgctagagcatgatttcacaccaaaagtttcagactttggactggccaggactgcgaggggggaggggaaccagcacatctccacccgcgtcatgggaacattcggttatgttgcaccggagtacgccatgacgggccatcttcttgtcaagagtgatgtatacagctatggagtcgtattacttgaacttctcacaggtaggaagcctgtggacatgtctcagcctgcaggccaagaaagcctagtcgcatgggctcgcccatatctgacaaatgtggtgggcttgcgtcaagctgttgatccacttcttggccctcatgtgccactggacaacgtggcaaaagcagctgccatcgcatccatgtgtgtacagcctgaggttgcacaccgaccgagcatgagcgaagttgtgcaggccttgaagcttgtctgcagcgagggtgatgagggtctaggttcgggaagtttcagccaggaatgggcggctcgtacaacagcggcttacgatgtaactggcatggaagcggagagggtgctattatctgagatgtttggttcaacgcctgtcttcactccagctgacgattcaggttctttccgcatgcagtccagctctggccccctgatgacaggcaagaacaagaagttctggcagaggatgcgaaacttgtcgagaggtagtatgagcgagcatggcgcctcgccagattttgagacacactcacagtgtagcaataggtgagtttttcttcttctgtccagcttccagtctcgacatggatattcagatgactggacataaagagtttgaagacctagtttgtgtacattatgcatgtggagataaaaggctatatatatagttcaggattatcagagtacctgtacaagatctgctcagatttggctctacatttggtttgatttaacgggttctgccgtactgctatgtggccatacacagatacgcctgccttccgatttgtaatgtttctcttttttcggcatgtcagtttgagttagtttgttttcccttttgtttggttagctgtttggtaggaattgttaatgtatagatttggagtttcggactacattttgccatgtgaatttcagctccatgcacgtacac

SEQ ID NO: 4336 - DNA, 1161 bp, Triticum aestivum
ggacagggacgaagcaatttcatgacccaaaggatgctgcggtgtctgtacacccagcggcggtgggcgcaccgccggggcggcttcgtcaccggcggcactggctggtcgcagaaggccgcccagccgccgtgatgggcgcgaagaagtcggagtggtgggcggtggacggcgagctgcacgagatcggggagggcgtgccacaccgcgagcgcttcgccattccgcgcgacaacctcccgaaccgccgacgcaagcagatgcgcgagcagttcatgcgccgcacgcgtctcgtcctcaaggactcggaacatgaaacctggtgcaaaaaatatatggaactgtaccaagaacttagagagaactgggaacggttgtactgggatgaaggttattcaaaaaagatggccgaagatcgtgctaattatgactctgctgaagaagatgatctagacttctcaccatacagcaggagaaggagctccagtgcagagcccaaacaaggaccttggttttggggaaagcaaacagggtgaaacatgggaaagggttactcaaattcgtgacaagtttgagtatgacagagaaaggagaatgagagagcgagcgtttgctcccatgaatatggagaacaattttggccagcagaactggaaaaggccagaagcccagaacgagtcagggttttcctcggcaaacatagaaactaagtctggtcatgattgggtttcataaatcaaactggtcggggtttccaacgtgaccaagtccctgagatcagcactattcggatttccgaaaggaatcaagtttcagaaatcggcaatatccaaatttccgaaaccagcttgatggaaacaataagtgatttggtgaccagagtcaagttttagccagcatgttgcaatcctgcgggaacactaaaaggtggtgcgcgattgccgagtctttgtgcttgctgatttcacacttttgtaatgctaattgaattgaaaatgagatgagaagtgatgacatgcttttatgttcgttgatgtagtcgtactacagtttagcctcgtctgtcaaaatgagatgagtgtaacataagatacagctgccctattttgccctcgcggccttgcccagctcttatcgtgagacagaatggtttttactcaa

SEQ ID NO: 4337 - DNA, 1184 bp, Triticum aestivum
gaaagctctggtagtgaagaagccatcaaaagactgggcgaagcgcattcagcatgagtgaaaagtcttagagaaagacttgccagataccatattcgtgagggcatacgaggatagaatggaccttcttagagttgtcattatgggtccagcgggcactccttaccatgatgggctctttttcttcgacatttacttccctcctcaatatccaaacatacctccacttgttaactaccgctctggtgggctgcggcttaatccaaacctgtatgcttgtgggaaggtgtgccttagcctgttaaacacctgggctggcagtggatgtgagaaatggaatccatccaattcaaccatgctgcaggtccttgtctccattcaggccctggttttgaatgccaaaccttatttcaatgagcctggatatgctaattcagctaacacacctggcggggagaaaagatccctaacttataatgaagacaccttcctgctgtcctgcaggacgatgttgtattctcttcgaaatccaccaaagcattttgaggatttcgtggccggccatttccgcaagcacgggcgcaacgtcctggtggcctgcaaggcctacctggacggggcgcaggtcgggtgcctcgccgggaacggggtgcaggacgtggacgagggtgacaagagctgctcgctcaagttcaagacctcgctcaagaggctgttcgaggagctgctgatggagttcacggtgaagggagcggactgcagcaagttcctgtcggagaaggcgaagcagtcggccgcctccgccaccacctctagagggcccccggcagacaccaccctgaggctataagcggtggtcgccagccgagccgagccgagccaaaatggtagcaataattttggccatggaagcgattcgattctaggcttgcctagctataactcctcctgccctgacctcgtcggtcgataggaggcgccctacccgagcgagaggggaattaaacctgattgttttttgtgtaagtagtttatgtacatatgccctccccgcctagctcttccggtgaacataatccatccatccgtatgtttagggacaagtatcatcatcagcaccatcatcacctgtgagagagacactatgattaatgtcaccgtcctaggcttaatatatatctgat

SEQ ID NO: 4338 - DNA, 1012 bp, Triticum aestivum
  N_region (46)..(46): n = any nucleotide
gtgagattcatcatgtcatgaatccggatccttaccgtggagcttntgggtctgatgctgcagcttatgccaggaagtcgaagaacacataaattttggcagttcaggaagggttggaggttttatcgcagaaactttccaaggtgtaggaggtactattgaactagctcctggatacctgaagtcggtctatgatactgtccggaaggcgggtggtgtctgtatagctgatgaagtccaaagtggttttggccgtactggaagtaactactggggattccagacgcaggatgtcatccctgacattgtaacgatggcaaagggaatcggcaacggtctaccactcggtgcagttgtaacaactcctgagattgctagcgtgatggctcagaagatccagttcaacacatttggtgggaaccctgtctgttctgctggtggattggctgtgctcaaggttctcgacaaggagaaacggcaggcgcattgcgcagatgtcggcgctcacttggtggaacgtctgaaatctcttcagcagaagcatgaaatcattggagatgtcagaggaagggggctgatgcttggggtggagctcgtcactgacaggacggagaagacaccggccaaggctgagaccgctgttctgtttgagaaactcaaggatcttggtgttctagtcggcaaaggcggtctccacggcaacgtcttcaggataaaaccacctatgtgcttctccaaggacgatgcaaatttcttggtggacgccatggactatgcgatgtcagggttctgaggaccctgaacgttcttgtgcctgcccctgaaccgtcaccgggcggctgcgcggagtgcatggggatgccctggtgctggtagcatggtacgtgcccatcgctgggctgcgtcactgcgtgtttgcacacaaggcatgtatatgtatgctgcgtgctcgggtgactatgtttgtgacggtgaaacgcaacccctacccagggatgaataaatggaggaa

SEQ ID NO: 4339 - DNA, 1201 bp, Triticum aestivum
ccagtcctgcgtccgctcctcccgttccccgccctctaccgcaccctcctcaccgacaacaatgccgccggcgccggccgccaccggcggcaacggagcttcattcgagatcctggacagcgagcccacgctgcacgcccgctactacgcgcgcggcgacaacgtgatgctcccggaggtgcccttcgaccgcttccgcgtcggctcccagttcttcgtgctcgccaggcggcacgccgtcatggtggtccgggaccggcggctctggaacaagttcaaggcgccgtgcctcgtcaaggagaaggactcgtgctacccggaggagcactacttcccgacgctgctcgacatgcaggaccccgacggctgcaccaagtacaccctcaccagggtcaactggaccgacgccgtcggcggccacccgcacacctaccagccggaggaggtctccggggacctcatcagggagctcaggaagtccaacggcacctactcccacatgttcgcgcgcaagttcgcgcccgagacccttgcgccgctcatggagatcgccgactccgtcatcctccgtgactaggcgcgaagtgttcgtggagatgaacagaacaagggttggtgatgtgatgaagaagcacaagctgatccatccatcccctttgtggtttcttcggagaggagcaagcaaccagcaccaaacccacttcgccttgttgttccgtcgctggccgtcggcgaaggggatgctgctgcttgcccaggctcagagagtgatgtggtgttggtggcgaagtgccccggctgcctctatcctatgtgagtatttgttgttgtgtttcttggtgtttttcctttccacttcgctccgagcaagaggaagtcgtcggcacgcacgcggtaggcgcgctgctggtagttagcacgaactatcatcctatgtattcacaacggaggcaacctgtcgatacatgtagcgatggtttttgtagtgtatgttatccccaccatgttgtcattgtcaatatcacacaccttttcctctaaaaaagaacaacaaaacagaggggggcgccaaaggagcccgctaagacgcggggggcaagcaagccctcatgtggccaaataaaccgggcggtttaccgggcgtggaaacgcgggtccacttagctgaaccctcttcaaagacgccaacaagagcctagcg

SEQ ID NO: 4340 - DNA, 1206 bp, Triticum aestivum
  N_region (370)..(395): n = any nucleotide
ctacagcggccacggcacgcgcctgccggccgagaccggccaggacgacgacaccggcttcgacgagtgcatcgtcccctccgacatgaacctcatcacagaccaagatttcacagagctcgtgcagaaagtcccagatggctgcctgttcaccatagtctctgactcttgccacagcggtggcctgcttgacaaggccaaggagcagattggccacagcacaaagcagaacaaggcgcagcaaggcaaacgggaagagcggtctgattccggctcgggcggcttccggacgttcctcaaacagaccgtccgggacgcgttcgagtcccaaggagtccacctccctcgccgcggcggccagcagagcagnnnnnnnnnnnnnnnnnnnnnnnnnnaggcgccgagcctggactcaggcacagacgggcacgtgaagaaccggtcgctgcccctctcgacattcatcgagatgctcaaggagaagacggggaaggaggacatcgaggtggggtcgatccggatgacgctgttcaacgtcttcggcgaggacgcgagccccaagatcaagaagttcatgaaggtgatgctggagaagctgcagcaggggcagcacggcggcgtggtgggcctggtgggcgcgctggcacaggagctgctgagggccaagctgcagggcaagcaggaggagctgaagccggccatggagcaggaggtgcacggcgtggaggaggtgtacgccgggacggcggcgagggcgccccacaacggcgtcctcatcagcgggtgccagaccgaccagacctcggcggacgcgacgaccgccaagggcctgtcctacggcgcgctcagcaacgccatccaggccatcctcgcggagaaggacggcaaggtgagcaacaaggagctggtgctgagggcgcgcgggctgctgtccaagcaggggtacaagcagcagcctgggctctactgcagcgacaggcacaccgaggtggctttcatatgctgagagcgtgaaacatcatccgttgtctttgtccgtcgatgagagagaacgttttctcctcgtgtgtcaaaactgtctgctattgtctgtggactgtggttttggagacccggacgccatgtgttgctaagattggactgtttgatgtttcatctcagaataacaatcacatgctctcaggtaattatatacctataatatat

SEQ ID NO: 4341 - DNA, 773 bp, Triticum aestivum
accggtcggtgccctctcgacgttcatcgagatgctcaaggagaagacggggaaggacgacatcgaggtggggtcgatccggatgacgctgttcaacgtcttcggcgaggacgcgagccccaagatcaagaagttcatgaaggtgatgctggagaagctccagcaggggcagcacggcggggtggtgggcctcgtgggcgccctggcgcaggagctgatcagggccaagctgcagggcaagcaggaggagttgaagccggccatggagcaggaggtgcacggcgtggaggaggtgtacgccgggacgacggcgagggcgccccacaacggcgtcctcatcagcggatgccagaccgaccagacctcggcggacgccacgacggccaagggcctgtcctacggcgcgctcagcaacgccatccagtccatcctcgcggacaaggacggcaaggtgagcaacaaggagctggtgctgagggcgcgccagctgctgtccaagcaggggtacaagcagcagcctgggctctactgcagcgacaggcacaccgaggtggccttcatatgctgagagcgccgtgaaacatcatcatccgttgtctttctttgtccgtcgatgggatgggagaagaaacgttttctcctcgtgtgtcaaaactgtctgttgtggactgtggttttggagacctggacaccatgtgttgctaagattggactgtttcatcacagaataacaatcacatgctctgaggttatataataatactatatacata

SEQ ID NO: 4342 - DNA, 736 bp, Triticum aestivum
cgacatcatcgaaagctcaggagaagacgggaaggacgacatcgagtcgggtcgatccggatgacgctgttcaacgtcttcggcgacgacgccagccccaagatcaagaagttcatgaaggtgatgctggagaagctccagcaggggcagcacggcggggtggtgggcttcgtgggcgccctggcgcaggagctgctcaaggccaagctgcagggcaagcaggaggagctgaagccggccatggagcaggaggtgcacggcgtggaggaggtgtacgccgggacgacggcgagggcgccccacaacggcgtcctcgtcagcgggtgccagaccgaccagacctcggcggacgcgacgacggccaagggcctgtcctacggcgcgctcagcaacgccatccagtccatcctcgcggagaaagacggcaaggtgagcaacagggagctggtgctgagggcgcgcgcgctgctgtccaagcaggggtacaagcagcagcctgggctctactgcagcgataggcacaccgaggtggctttcatatgctgagagcgccgtgaaacatcatccgttgtctttgtccgtcgatgggaggaaaaacgttttctccccgtgtgtcaactgcctgctattgtctgtggactgtggttttggagacctggacgccatgtgttgctaagattggactggtcgatgtttcatcacagaataacaatcacatgctctgaggttataatat

SEQ ID NO: 4343 - DNA, 711 bp, Triticum aestivum
  N_region (420)..(463): n = any nucleotide
tctcgtcgggcgggtcccacagcatccacaccgtccggcgccgtcgtcgccgtggacggaccaggccctgaccttgctgatcaacctggcgctgagctggcccgggaagaaggagatcgcggcgaaccaggccatcgtgggcgacatcgtgttcatcctggacaacggcgaggcggcggagcaggagaaggcggtgtcgtgcctgtggatgatctgcaacggcgacgaggggtgcagccagacggtgctgcaggagggcgtgatcccggcgctggtgtccctaacggcgaacggcacgggcaaggccaaggacaaggcgcagaggctgctccggctgttccgggagcagcggcagcgcgagctggagcagcagcagccacgggtggagctgctcgaggtggccagccaggccgccgcgcnnnnnnnnnnnnnnnnnnnnnnnnnnnnnnnnnnnnnnnnnnnngaggccgcggggaagacggcgtccgagcagggcagcgagggcaagaagccgccggcgcggctgagcaggtccaagtccaagcggctggccagggtcatcacctgcctcatcaagaagtggacgacgccaggcggcggcggcgacaagtgtaaactgtaaccctgtagaatgtgtggtggtactgtatcgtcacattcaccaaaaatgtgtgtgctctccatgtgtaaaatacaactagcgaaattgta

SEQ ID NO: 4344 - DNA, 793 bp, Triticum aestivum
tctcgtcggcgtggtccacagcatccacaccgtcctggcgccgtcgttgccgtggacggaccaggccctgaccttgctgatcaacctggcgctgagctggcccgggaagaaggagatcgcggcgaaccaggccatcgtgggcgacatcgtgttcatcctggacaacggcgaggcggcggagcaggagaaggcggtgtcgtgcctgtggatgatctgcaacggcgacgaggggtgcagccagacggtgctgcaggagggcgtgatcccggcgctggtgtcgctgacggcgaacggcacgggcaaggccaaggacaaggcgcagaggctgctccggctgttccgggagcagcggcagcgcgagctggagcagcagcagccgcgggtggagctgctcgaggtggccagccaggccgccgcgctagctaggtaactaggtaggaggaggtagctagctagctagcaagcagctaactagctaggtaggtatgccgctgcggggaagacggcggcgtccgagcagagcggcgagggcaagaagccgccggcgcggctgagcaggtccaagtccaagcggctggccagggccatcacctgcctcatcaagaagtggacgacgccaggcggcggcggcggcgaacaagtgtaaactgtaaccctgtagaatgtgtggtggtactgtaccgtcacattcaccaaaaatgtgtgcgctcgtgaagctccatgtgtaaaatacaactagcgaaatcgttcacgacgttgtaactgcgactgggagaagattacagccgtcgtc

SEQ ID NO: 4345 - DNA, 1275 bp, Triticum aestivum
  N_region (916)..(940): n = any nucleotide
tgaggtggtcgagcaggtcaggttccagttgaagggtgatgatgagctcagggactatgtgggtgctaatggtattactgagccactcacctgcttcctgaagatggctctcagcagagaagacgtgcaatctcaggaggtcggaacaatggctcttttcaatcttgccgtcagcaataacaggaacaagcggcagctgctctcagctggagttatccctctgatggagcagatgatgcagaaaccggagacctgcgaggctgcggtggcgatgtacctcaacctctcctgtctggaggaggcgcaggccatcatcggctcgagccaagtcatccctgtcctgatcaggtgcctgcaagaagaagggtaccggagcgacacgtgccggctggacgcgctcctgacgctgtacaacctgtccctgcacgcgcccaacatcccggcgctcctctcgtcgggcgtcgtccacagcatccacaccgtcctggcgccatcgtcgtcgtcgtggacggaccaggccctgaccttgctgatcaacctggcgctgacctgggccgggaagaaggagattgcggcgaaccaggccatcgtgggcgacatcgtgttcatcctggacaacggcgaggcggcggagcaggagaaggcggtgtcgtgcctgtggatgatctgcaacggcgacgaggggtgcagccagacggtgctgcaggagggcgtgatcccggcgctggtgtccctgacggcgaacggcacgggcaaggccaaggacaaggcgcagaagctgctccggctgttccgggagcagcggcagcgcgagctggagcagcagcagccgcgggtggagctgctcgaggtggccagccaggccgccgcgcagcaggaacaggaggaggaagagcagcagcagcaacaacagcannnnnnnnnnnnnnnnnnnnnnnnnaagtacggcggcgtccgagcagagcagcgagggcaagaagccgccggcgcggctgagcaggtccaagtccaagcggctggccagggtcatcacctgcctcatcaaaaagtggacgacgccaggcggcggcggcgacaagtgtaaactgtgaccctgtagaatgtgtggtggtactgtatcgtcacattcaccaaaaatgtgtgtgctcgactgctcgtgaagctccatgtgtaaaatacaactagcgaaatcgtacagacgttcaactgcgactgggagaagagaagagcttcttctcccgtccgagtaaaactgtaattagttctcgtgctagt

SEQ ID NO: 4346 - DNA, 1277 bp, Triticum aestivum
ctcaggggtgtcctcccccgcggcctaacgggtccaaagggggcgccccaggggaaaagaagggcgggggagccacgaggtaacaacgggacctggcaaaagaattttgtcgcccgccactataggagttcccacttccctctagaaaaacatattcagtgttttgatattagcttgcttgtgaagcccttggctacaagtggaaagatagccgcaaagtcttcaaaatcgaaatgatgacataattcattggaatcatacccttaagtttctgaagcctattttaacacaagagcaagagcaagaattctacccacacactgaggaacggcaatctcaggcaaagcactctcgggaagagcaacctcaaatggggcagtctcagggaaagcaacctcaaacgggttgtcaggcaaagcacactctgggagagcaacctcaaacgaggcagtctcaggtaaagcactctcagggagaccagcctgaagaaggggagggagggcgatctcaagaagaacaatcgcaggcaaggccatatctgggatgtcaacctcatccatcgcagtcaacttatggtggttggaatggtttggaggagaacttttgtgatcataagctaagtgtgaacatcgacgatcccagtcgtgctgacatatacaacccgcgtgccggtacgataacacatctcaacagccaaacgttccccatccttaacatcgtgcaaatgagtgctacaagagtacatctctaccagaatgccattatttcaccattatggaacattaatgctcatagtgtgatgtacatggtccaaggacatatatgggttcaggttgtcaatgaccatggtcgaaatgtgttcaatggccttctgagcccagggcaactattaatcataccacaaaactatgtcgttctgaagaaggcacaacgtgatggaagcaagtacattgaattcaagactaatgcaaattccatggttagtcacatcgcgggaaagaactcaatcctcggcgccttgcccgttgatgtcatcgccaatgcatacggcatctctaggacagaagctcgaagcctcaaatttagtagggaagaggagctgggggtattcgctcccaaattcagtcaaagtatcttccatagttttcctaagggcggagaagattcatcttcagagggcatgacctaatgtcagaactacctcatggagtaaaataaagacatcactgagcgtgtagaactttgatgtttccatatatggtcatctcaataagata

SEQ ID NO: 4347 - DNA, 868 bp, Triticum aestivum
ggcagtctcaggcaaaacactatcaaggagaccaacctgaagaagggcaggaagggcaatctcaagaagaacaatctcaggcagggccatatccgggatgtcaacctcgtgcagggcaatctcatgcatcacaatcaacttatggtggttggaatggtttggaggagaacttttgtgatcataagctaagtgtgaacatcgacgatcccagtcgtgctgacatatacaacccgcgtgccggtacaataacccgtctcaacacccaaacgttccccatccttaacatcgtgcaaatgagtgctacaagagtacatctctatcagaatgccattatttcaccattatggaacattaatgctcatagtgtgatgtacatgatccaaggacatatctgggttcaggttgtcaatgaccatggtcgaaatgtgtacaatggccttcttagcccggggcaactattaatcataccacagaactatgttgttatgaagaaggcacaacgtgatggaagcaagtacattgaattcaagactaatgcaaactccatggttagtcacatcgcgggaaagagctcaatcctcggcgccttgcccgttgatgtcatcgccaatgcatacggcatctctaggacagaagctcgaagcctcaaatttagcagggaataggagctgggagtattcgctcctaaattcagtcaaagtatcttccatagttctcctaccaacgaagaagagtcatcttaagagcgcatgagctaatgtcaaaactagctcatggactaaaataaacacatcattgagtgtgtagcactttgatgtttccatatatggtcgtctcaataagatatcaacaaaggtccattgtgttt

SEQ ID NO: 4348 - DNA, 1313 bp, Triticum aestivum
gccaattgtggctatctatgttttcgacgtaaacaactatgctaatcaacttgagcctaggcataaggaatttttgttcgctggcaactataggagttcgcaacttcactctagtcaaaacatattcagtggtttcgatgttcgattgcttgctgaggccttgggtacaagtggaaaaatagcgcaaaggcttcaaagtcaaaatgatgacataattcatgtgaatcatacccttaaatttctgaagcctgtttttacacaacagcgatagccagaatcctacccacacactcaatatgaggaagggcaatctcaggcaaaacactctcaggaagagcaacctcaaatggggcagtcacaggaagagcaacctcaaatggggcagtcacagggagagcagcctcaaatggggcagtctcaggcaaagcacactcagggagagcaacctcaaatggggtggtctcaggcaaagcactctcagggagaccagcctgaagaagggcagggagggcaatctcaagaagaacaatctcaggcagggccatatccgggatgtcaacctcatgcagggcaatctcatgcatcacaatcaacttatggtggttggaatggtttagaggagaacttttgtgatcataagctaagtgtgaacatcgacgatcccagtcgtgctgacatatacaacccgcgtgccggtacgataacccgtctcaactcccaaacgttccccatccttaacatcgtgcaaatgagtgctacaagagtacatctctaccagaacgccattatttcaccattatggaacattaatgcccatagtgtgatgtacatgatccaaggacatatctgggttcaggttgtcaatgaccatggtcgaaatgtgttcaatgaccttcttagcccggggcaactattaatcataccacagaactatgttgttctgaagaaggcacaacgtgatggaagcaagtacattgaattcaagactaatgcgaactccatggttagtcacatcgcaggaaagaactcaattctcggcgccttgcccgttgatgtcatcgccaatgcatacggcatctctaggacagaagctcgaagcctcaaatttagcagggaagaggagttgggagtattcgctcctaaattcagtcaaagtatcttccgtagttttcctaacggcgaagaagagtcgtcttaagagcgcatgagataatgtcaaaactagctcatggactaaaataaacacatcattgagtgtgtagcactttgatgtttccatatatggtcgtctcaataagatatcaacaaagtcc

SEQ ID NO: 4349 - DNA, 1471 bp, Triticum aestivum
  N_region (1200)..(1200): n = any nucleotide
caagaaattgcagttcagattggtggtatgatgatgtgtcatgcttaagccttccattatacaagaaggtaatctcagctatggaataccgaggcgtcaatcaggacattattgttggatcccttaaccattatgccaaaaggcgtttacctggtctgaatcggcgcaaaagcattagcgatgtcagtaactgcctttcagtgtcaactttaaccgccatgccttctgaagaggagcaaaggtatcttcttgaggagattgataggctgttacctttccaaaggggtgttacatcttgcaagctgttatttggccttctgcgcacagcgatcttccttaaagccagctcatcctgcatgtccaacttggagcgtcggataggtttgcagcttgataaggccactctggaagatcttctaataacaaacatgtctgaatctattgaaatgctctatgatgtggattgcgtacataggattcttgaccatttcttggcaatggatcaagaaactggtggagcttctcctggcattggcgaggatgggcacctattggcttctccatctctattgccgattactatggttgctaagttgatcgacggctacctagctgaagttgcaccagatgccaacctaaagttgccaaagtttcggtctttggctgctgccataccagactatgctcggccaatagatgatggactttatcgcgctgttgacatctatctgaaggctcatcctcatctgtcggaatcggagaaggaggagctttgccgggtgatggactgccagaagctctccctggaggcttgcacccacgcggcgcagaacgagcgtctccccctgcgggtcatcgtgcaggtcctcttcttcgagcagctgcagctccggagctccatcgccgagtgcctcatgatctccgagaacctcgagggcggatcgaggcagctcggcatgccaacctctagtgagcaacaccgtggcggcggcggctggcccctggccgccagggagaacaggccctgcgcgagggcatggacggcatgaagctagcgggtggccgagctggagaaggagtgctccaccatgcgggaggagatcgcgaggctgggccgcagcaggagcaccggcaagtagcaggctgttctcccttggcgcgaagccgcagatctgcagcaccgccaaggtatgctgcccntgcgaaggcggcaacgtcgagcgacgacgacaagctggccgtggtgaaagctgatgccacaccccggctgaagctgagcagacacaagaagaacctgtccatagaggcctagctccatcgtttgtgctactctgtactctgagttgctgttttgccggtgaacttgttagatgctttttacataccaccaccacctgtgaacgaagaactggaagaagaaaatgagattgtatgagacctcattctaagttttttacagtcaacgcggtat

SEQ ID NO: 4350 - DNA, 654 bp, Triticum aestivum
tagccatcgcaatgctctggaatggcagcgaacgtccctcctatggggtgtggcgcgagcacaccaagaaattctccccccagtggttcgcagcagtccatgctgccgttccgttcattgcgatgctgaggaagtccgtcaacatgcccaggaccgcgatggtgttcaccatagcagcctccatcctcgggcagaccatcgggtctagggccgagcgcatccgcctgaagactctggctgcaaagggcactgccggccccgccaccgcagtcactgtcatgtatccagacaagggcggcagctgcagcgatgccgagggcaaggcgtgggatcctcttgcactgaagatgcctggctctgctaacgccggcgctcctgcaccaacccctagcatgtgcttctaaccgcggaatttagcggccaggtaccgatttctatttatcgtgtatgtaattgccttgcctgttcccagaaagcagagctgtttgtgatattttctgaggatgaggcaagtggaataaggtgctatattaccatgtcctgctgtgaacctgtcattgtgtgtcgtcagtccatgcatctgtaatctgatgctgatatatatgatatatgtacccagaaacaattatattgtggttgtccttaaagcgattt

SEQ ID NO: 4351 - DNA, 1495 bp, Triticum aestivum
ccgcgctgtgcccaccacacgagtcctctccctgtgtgtcccccaccgcacggacggagacaagcacgcaggcgagcagctctccggcgagtcgtctaggatggaagtgctgttcagtagcctgttctgtgactcagcatcatcggagaacttttctggtcatcctggtgttgagagatgcccattcctgaggaacatcaatggagctacaaccttttcattttcttctgctttgcctgtagctgcccgaggaggcaagggtcccatctttgaggatggaccaggatttgagtcggcattcaagcttttccatggacaggatgggatagttcccctttcaggaagatcatatgtgcctgatgagaaccgcagtgagagcactgatgtcaagcccgaacctgctcttccctttaatccattggctgctagagccgctaccataagtctatcagcatttggaccattcgggttcaacttctttaatggcaagggcaaaaagcagaacaagaagcccaacaatctcgaccagtcacagaagaagcctaacaagccagatcagaattccatgaaacaaaaaggaggcaacccaccgtcccatgaggcaatgagtgatgaatggctagaaaatggacagtgcccactcgctcggtcttaccgggcaatgagtggtgttctgccccttgtcgccaaggcactacagccaccagctggtatgaagctgaagtgcccgcctgcaattgttgctgcacgagcggcccttgcacgcacaacccttgtgaagtccctccgtccccagcccctgcctgcaaagatggtagccattgctatgctcgggatggcagcgaacgtccctctaggtgtgtggcgcgagcacaccaagaaattctccccccagtggtttgcagcagtccatgccgccgttccgttcatcgcgatgctgaggaagtccgtcaacatgcccaggaccgcaatggtgttcaccatagcagcctccatcctcgggcagaccatcgggtcgagggccgagcgcatccgcctgaagactctggctgcaaagggcaccgccggccccgccaccgcagtcaccgtcatgtatccagacaagagcggcagctgcagcgacgccgagggcaaggcgtgggatcctcttgcgctgaagatgcctggctctgctaacgccggcgctcctgctccaacccctagcatgtgcttctaaccgcggaatttagcggccaggtaccgatttctatttatcgtgtatgtaattgccttgcctgttcctggaaagcagagctgtttgcgatgttttctgaggatgaggcaagtggaataaggtgctatagtaccatgtcctgttgtgaacctgtcatggtgtaacgtcagtccatgcatctgtcatctgatgctgatatatatctaccaagaaacaaaacaattatattgtggttgtccttgaagcaatttgttatgctgtgcctgaaactttggttgttac

SEQ ID NO: 4352 - DNA, 862 bp, Triticum aestivum
  N_region (838)..(838): n = any nucleotide
gaatgtcatccacttactgcatttcatttaaagtgaagaatactgaggctgtccctcctgtgaaggatcttagaaagacaatgagaattcaagcattgcgctgtcatgtattgtacagccatgatggcagcaagttgaacttcatacctgttctggcatcacgatcccaagcactaaggtacttgtatataaggtggggggtagagctgtcgaacatgacggtggttgttggtgaaagcggcgatacagattatgaagggctacttggaggcatgcagaagaccatcatactcaaaggctcatttaattccgcgccaaaccagcttcatgccgccagaagctattcgctagaggatgtcgtatcgttcgacaagccaggaattgcttccgtcgagggctatgccccagataacctgaaatcagctctacaacaatttggtgtcctggagggctaggatcaccaacttgtcacagtcagcagaggaataaagaggtgtgttgatacacactcctcgctatggggtcgcacacgagacacggcgacctcttcccgtgttgccagacgctaccgtggcggcaatcgagcacaagggcgtggcttgcatgctcggtttaccccttcagattttgcgacctacattcaattttcaactcatggtgaaattgttcataggttccaaataaataactagtgtcgaactatggtcataaagtgcgtgctatagggaaggggaatgagtaccctgttgcgtggaaaccatatcttcatgcatcttaactgattagctccttcacttgtgcactccgctctgatgatcagacgcgcggtactaagagnactttggaactgtttatggacact

SEQ ID NO: 4353 - DNA, 860 bp, Triticum aestivum
taaagtgaagaatactgaagctgtccctcctgtgaaggatcttaggaagacaatgagaattcaaagcattgcgctgtcatgtattgtacagccatgatggcagcaagttgaacttcatacctgttctagcatcacgatcccaagcactaaggtacttgtatataaggtggggcgtagagctgtcgaacatgacggtggttgttggtgaaagcggcgatacagattatgaagggctactcggaggcgtgcagaagaccatcatactcaaaggctcatttaattccgcgccaaaccagcttcatgccgccagaaactattcgctagaggatgtcgtatcgtttgacaagccaggaattgcttccgtcgacggttatgccccagatatcctaaaatcagctctacaacaatttggtgccctgcagggctagaatcaccagctttgtcagagtcagcagaggaataaagtaggtgtgtggaggcacacttttgctatggggtcgcacacgagacacggcggcctcttcccgtgcctggtatctggcaagggtgtgactgtggcggcaattgagcacaagggtgtggcttgcatgctcggtttaccccttcagattttgtgacctgcattccattttcaacgcatggtgaaattgttcataggttccaaataaaaacagttagtatcgaactatggtcataaagcgtgtgctatagggaatgaagtaccctgttgtttggaaaccatatatatacccaacaatgtgcatgcatctctacgaataattagcatctccaaggagctggagctggagcgagcaatcttaattttagtggattgtgtaaaaacactttcctcaccagtt

SEQ ID NO: 4354 - DNA, 1621 bp, Triticum aestivum
ctgaagtttctgaaacagatcacctggtgactctttgagggatattcatgatatatcacttaacttgaagatctccttggacagtgaaaaatcaggcagcatgtcaaaatatggaaggagttcaaccagtgataggagaaaccttgaggatgctgtacaaaaattttcagaagctgttagtgctggcacaaaggatgagtctggtgagaaagctggggccaccacaggctccaataaatggccatctctgcgaaggagaaaacacatcgttgttattgctgtagattctgtgcaagatgtggacttggttcagattatcaaaaacatttttcaggcttcaaacaaagaaaaatcatctggtgctcttggttttgtattgtcaacatctcgagcagcatcagagatacatcctttgttaacatctgggggcatagaaattactgattttgatgccttcatatgcagcagtggcagtgatctttgctatccatcttcaaattcagaagacatgcttagccctgccgagcttccatttatgattgatcttgattatcactctcagattcaatatcgttggggaggagaaggtttaaggaagacactaattcgttgggcagcagaaaagaacagcgagagtggacaggaagcagttgttgaagatgacgaatgttcatccacttactgcatttcatttaaagtgaagaatactgaggctgtccctcctgtgaaggatcttaggaagacaatgagaattcaagcattgcgctgtcatgtattgtacagccatgatggcagcaagttgaacttcatacctgttctggcatcacgatcccaagcactaaggtacttgtatataaggtggggggtagagctgtcgaacatgacggtggttgttggtgaaagcggcgatacagattatgaagggctactcggaggcgtgcagaagaccatcatactcaaaggctcatttaattccgtgccaaaccagcttcacgccgccagaagctactcgctagaggatgtcgtatcgttcgacaagccaggaattgcttccgtcgacggttatgccccagatatcctgaaatcagctctacaacaatttggtgccctgcagggctagaatcaccaacctgtcacagttagtaaaggaataaagtaggtgtgttggtacacacttttgctatggggtcgcacacgagacacggcggcctcttcccgtgcctggtatctggcaagggcgcgaccgtggcggcaatcgagcacaagggtgtggcttgcatgctcggtttaccttaccccgtcagattttgcgacctacattccattttcaaacgcatggtgaaattgttcataggttccaaataaatacagttagtatcgaactatggtcataaagcgcgtgctgtagggaatgaagtaccctgttgtttggaaaccatatatatacccaacaatgtgcatgcatctctacaaatacataggagcgggggaagtgcaactccgccgtcttaattttaccgggttatgtacaatttccccacgggttatttatgttttctttcttcatgcatcttaactggttagctccttcacttgtccactccactcagttgtaaaaaca

SEQ ID NO: 4355 - DNA, 576 bp, Triticum aestivum
tcaccgatccccaacttcaacgggctccatgtcctcctggtggacggtgatgacaccaaccgagcggtcacccacaagctcctggagaagctcgggtgccgagtcttttcggtcagctcgggcatccagtgcatgagctcctttgcgggcggcgagtcgtccttccagctggtgcttctggacctgacgatgcacacgatggacgggttcgaggtggccctggcgatccgcaagttcaggagcaacagctggccgccgctgatcgtggccctcgcggcgagctcggacgacaacgtccgggaccggtgccagcggtcggggataaacggtctgctccagaagcccgtcacgttggcggccctgggggatgaagtgtatagagtccttcagcacaactgaaagttgtcgtcgtctctgtggatcttgatagattgttgtagcttgatgggtagttgattcgccactgccactagctagtagttcccttttgatcgattgttatgccaggttaggtcccatacagatgacaagaaacatttgtgcacaaacaaaaaggaaggaatttcttaattgtac

SEQ ID NO: 4356 - DNA, 1621 bp, Triticum aestivum
caatcctgaggcagggctccggtcgctgtgatacggatgccgatgctaagggtgtccaatttcaaaggaggcaccccggaaatgatggaaacgagctatgctattctggtcttggtcttacccgaggacggttccctagggtggggtgagcaggagctggagattgtcgaagtgatcgccgatcaagtggcggtcgcgctctcgcatgctgctgttcttgaggagtcgcagctgatgcgagagaagcttgctcagcagcacagggacttgctgcaggcaaagcatgaggctgtgatggcaactgaagccaggaattcctttcagagtgccatgtatgacgggatgcgcagaccgatgcactcggtccttggtctcgtctcgatgatgcaacaggaaagcatgaatccagagcaaaggctcgtgatggacgccatcgtcaagacaaccagtgttgcctcaacgttgatgaatgatgtcatgcaaacatcgacgatggaccgtgagcacttatctctggtgaggaggccattcagcctccactccttgattaaggaagcagtcagcgttgtaaggtgtctgtgtggctccaagggggttgatttcgagtttcaagtggagaattctttgcccgaaagggtcgttggcgacgagaagagggttttccatattgtcttgcacatggtaggcactctgatacaccagtgccgtgcgggctgcctctctttgtatgtgaatagttacaacgagatggatgagaggcataataatcaggactggatgctgctgcgaagagcaaacttttctgccggatatgtgtgtgtcaagtttgagattaggattaaaaaatccagaaacagccttttgggtgcgtctgccagccaaataagtcaagagccgaacgctagcagttcggagatgggccttagcttcaacatgtgcaagaagattgtgcagatgatgaatggtaatatctggtccgtatcagacccagaagggttgagagagacggtcatgctggctctccagttccaggtgcaacatgtgacccctgtctcaggagcatcctcggacctataccgattatcaccgatccccaacttcaacgggctccatgtcctcctggtggacggtgatgacaccaaccgagcggtcacccacaagctcctggagaagctcgggtgccgagtcttttcggtcagctcgggcatccagtgcatgacctcctttgcaggcggcgagtcgtccttccagctggtgcttctggacctgacgatgcacacgatggacgggttcgaggtggccctcgcgatccgcaagttcaggagcaacagctggccgccgctgatcgtggccctcgcggcgagctcggatgacaacgtccgggaccggtgccagcggtcggggataaacggtctgctccagaagcccgtcacgttggcggccctgggggatgaactgtatagagtccttcagcacaactgatctctgtggatcttgatagattgttgtagcttgatgggtagttgattcccttttgatcgattatgccaggttaggtcccatacagatgacaagaagcatttgtgcaaaaactaaaaaaaaagtaaggaattaattgtac

SEQ ID NO: 4357 - DNA, 726 bp, Triticum aestivum
ccgaagtgtgttcctgaggaccagatcgagaaaccggtgcaccgtatgccgacgcttttccggcgcccatctgcaggacgcgggaactacgcaacggcatgggggtagtagtttgctgtaatcacatgcgaaggcaagatgagataactcaggtcataattcatgagttagtacatgcttatgatgactgtgttgtcaagaacatcgactggaaaaactgcgctgaccacgcttgctctgagattcgagctaatcatcttagtggcgattgccattacaaacgtgaactgatgaaaggcttcctgaagataaaggggcatgagccagaatgtgtcaaaagacgtgcgctgctttctgtcaaggtgaacccgcactgttcagaaaaagatgcagaagctgcagttgagaaggtgtgggatatgtgctacaacgacccacgcccgtttgataaggctctatgaagtgaaagctggtagggcagttttgttaactctcagacgggttctatcaagtgtatcctgtgggacagtctagtttcccttcagacgggctccatgtaagtacttcagcaaagcgttgcaacaaaatctggaaatttggtgctggggcaaaactttgaatgtcatgatattagtccagacaatctaacagattattccatgtaatccaattgttttacatggcatatagtgaaagttctctgagctctaaataagagtgggtgtg

SEQ ID NO: 4358 - DNA, 736 bp, Triticum aestivum
ctgaggagcagatcgagaaccgggcaccgtatgcccgacgctttcccgccggccatctgcacgtccagcgggactacgcaagcggcgtgggggtacaagtttgctgtaatcacatgcgaaggcaagatgagataaatcaggtcataattcatgagttagtacatgcttatgatgactgtgttgtcaagaacatcgactggaaaaactgcgctcaccaggcttgctctgagattcgagctaatcatcttagtggcaattgccattacaaacgtgaactgatgaaaggcttcctgaagataaaggggcatgagccagaatgtgtcaaaagacgtgcgctgctttctgtcaagaacaacccgcactgttcagaaaaggctgcagaagctgcagttgagaaggtgtgggatatgtgctacaacgacccacgcccgtttgataaggctctatgaagtgaaagctgccagggcagttttgttaactttcagccgggttctatcaagtgtatcctgtgggacagtctagtctctcttcagacgggctccatgaagtacttagcaagcgttgcaacaaaatctggaaatttggtgctggagcaaaactttgaatgccatgacattagtccagacaatctaacagattattccatgtaatgcaattgttttacatggcatatagtgacagctgactgagctataaataagagtggctgtgaatgattaattctttataccagcta

SEQ ID NO: 4359 - DNA, 689 bp, Triticum aestivum
gtccagcgggaatacgcaagcggcgtcgggggtacaagtttgctgtaatcacatgcgaaggcaagatgagataactcaggtcataattcatgagttagtacatgtttatgatgactgtgttgtcaagaacatcgactggaaaaactgcgctcaccaggcttgctctgagattcgagctaatcatcttagtggcaattgccattacaaacgtgaactgatgaaaggcttcctgaagataaaggggcatgagcccagaatgtgtcaaaagacgtgcactgctttctgtcaagaacaacccgcactgttcagaaaaagctgcagaagctgcagttgagaaggtgtgggatatgtgctacaacgacccacgcccgtttgataaggctctatgaagtgaaagctgccagggcagttttgttaactttcagacgggttctatgaagtgtatcctgtgggacagtctagtttctcttcagacgggctccatgaagtacagtacttagcaaagcgttgcaacaaaatctggaaatttggtgctggagcaaaactttgaatgccatgatattagtccagacaatctaacagattattccatgtaattcaattgttttacatggcatatagggacagctgactgagctctaaataagagtggctgtgaatgattaattctttataccagctaagtattg

SEQ ID NO: 4360 - DNA, 548 bp, Triticum aestivum
  N_region (174)..(193): n = any nucleotide
gaagcacaaaagcttagcggcggtggttattgtgcatttgtagatgcagagcatgctttggatccaactctggcagagtcaattggtgtcgacaccggtaacttgcttctctctcagccagactctgctgagcaagcactcagtcttgtagacacgctgattcgaagtggctcnnnnnnnnnnnnnnnnnnnnacagtgtagcagctcttgtccccaagaccgagcttgatggagagatgggtgatgcacatgtggctctccaagccagactgatgagtcaagctcttcgcaaactgagccattctctttcactatcccagacagttttgctatttattaatcagatcaggtctaaggtacagacgtttgggggaggatttggagggccacaagaggtcacttccggtggaaatgcccttaaattttatgcctcagttcgcctgaacatcaggcgaattggcatggtaaagaaaggtgaagagattataggaagtcaggttactgtgaagattgtgaaaaacaagcatgccccaccgttccaggactg

SEQ ID NO: 4361 - DNA, 705 bp, Triticum aestivum
ggcacgcacccgcgagaccagtctcccggcgtccattgccatcatgtcatcgcaggctggtcaggttggtgtttatgggtatactgcttactccgcgagcaagttcgcactaactggacttgcagagtcgctgcagcatgaggtcgtttcggacgatattcacgtgtcgctgatcttccctcctgacacagagacaccgggtcttgtcgaggagaagaaaaagaggccagagcttaccactatcatagcagattcatctggtggaatgaaggctgatgatgttgctatgaaggctctaaccggcatcaaatctgggaggtttattatcccctgcaatttcgagggagcaatgttagctatagccacttctggtctaaccccccagagttccccgttaattgcattcgtggaggtgatcggtgctggactgatgcgatttgtagcactatgtttccagtggaattggttctctactattgagaactggtgcgccaagaacaagaaacatgggtgaaagcccaacctgggattcccagattttcaagggcttacaatttatatacaaccaataatgtaccttgttatccctggactgaatgtatatcccacttgtactttgggatacaatgtatatctgggttattgtttttgaccagttatacttagcacgttgtacacttgtactggacagacagttcaaaattc

SEQ ID NO: 4362 - DNA, 561 bp, Triticum aestivum
taaaagagcaagcggcgtcaagtaccttgacaagaaatggtgtgtgctgaagcccactgtcagcctcgacgacccaaagcttccagacacggtgagctacgcgtgcgccagggcagactgcaccagccttggctacaggacttcctgcgggatgctggacacccggagcaacatctcgtacgcctacaacagtttctaccagaagaacgaccaagacgacgtggcctgcggcttctcgggctacgcgacgaccaccggccaggaccccagcaccgggacatgcaggttcgggatcatgatcgaggtcgactcggcctactcgtggaagccgacggcgggtccgaagcaactacctcctggtgcttctccttgcacttgttcacctctgcgtgtcatcctcataggtgttttttctttttctttgcggaagatggcccggccatgacagcatcaacagcctggcagcttagaggggtatttgatgcctgccgtcagtgttcatccatgtaggaacctttttcgatcgattttcttcgttctaatttcggtggatgcggacgt

SEQ ID NO: 4363 - DNA, 797 bp, Triticum aestivum
tttcgagcgccactgggggatctacacatacgatggcatccctaagtatcagctgaacttcggtgtgccgaattcacagattaaaagagcaagcggcgtcaagtaccttgacaagaaatggtgtgtgctgaagcctactgtcagcctcgacgacccaaagcttccagacacggtgagctacgcgtgctccagggcggactgcaccagccttggctacaggacttcctgcgggatgctggacacccggagcaacatctcgtacgcctacaacagcttctaccagaagaacgaccaagacgacgtggcctgcggcttctcgggctacgcgacgaccaccggccaggaccccagcaccgggacatgcaggttcgggatcatgatcgaggtcgactcggcctactcgtggaagccgcggctggtccgcagcaactacctcctggtgcttctccttgcacttgttcacctctgtgtgtcatcctcataggtgtttttctttttctttgcggaagatggcccggccatgacagcatcaacagcctggcagcttagagggatatttgatgcctgctgtcagtgttcatccatgtaggaacctctttccatctttttcttcttctaatttcggtgggtgcggacgtcgcagccgcatggttgaaaattcgtctcgttagcgtagctttgatcatccggtaccattgtgattgggatggtgatgcagtggaccatttatacccaggaatgtgagtgagggcatagctatcaacctgcaaatagtgatgactccagatcagtcatta

SEQ ID NO: 4364 - DNA, 561 bp, Triticum aestivum
ttcggacgatattcatgtgttcgctgatcttccctcctgacacagagacaccgggtcttgtcgaggagaagaaaaagaggccagagcttaccactatcatagcagattcatctggtggaatgaaggctgatgatgttgctatgaaggctctaaacggcatcaaatctgggaggtttattgtcccctgcaatttcgagggagcaatgttagctatagccacttctggtctaaccccccagagttccccgttaattgcattcgtggaggtgatcggtgctggactgatgcgatttgtagcactatgtttccagtggaattggttctctactattgagaactggtacgccaagaacaagaaacatgggtgaaagcccaaactagccctgagattcccagattttcataggactttatacaaccaataatgtacattgttatccctgcactgaatgtatatcccggttgtattttgggatacaaaatgtatatctgggttattatttttgaccagatatacttagcacgttgtacacttgtactggacagaaagttaatagtccc

SEQ ID NO: 4365 - DNA, 714 bp, Triticum aestivum
catgaaggcaacgcacccggcgagaccagtctcccggcgtccattgccatcatgtcatcgcaggcctgtcagtttgttttatgggtatactgcttactccgcgagcaagttcgcactaactggacttgcagagtcgctgcagcatgaggttgtttcggacgacattcatgtgtcgctgatcttccctcctgacacagagacaccgggtcttgtcgaggagaagaaaaagaggccagagcttaccactatcatagcagattcatctggtggaatgaaggctgatgatgttgctatgaaggctctaaacggcatcaaatctgggaggtttattgtcccctgcaatttcgagggagcaatgttagctatagccacttctggtctaaccccccagagttccccgttaattgcattcgtggaggtgatcggtgctggactgatgcgatttgtagcactatgtttccagtggaattggttctctactattgagaactggtatgccaagaacaagaaacatgggtgaaagcccaaactagccctgggattcccagattttcataggactttatacaaccaataatgttcattcttgtcctggactgaatgtatatcccggttgtactttgggatacaaaaatgtatatttgggttattattttttaccagatatacttagcacgttgtacacttgtactggacaggaagttaaaaatcccc

SEQ ID NO: 4366 - DNA, 1121 bp, Triticum aestivum
ggaggccgtgcttgacgttggtggtgtctatgatcccagccggcatcgctatgatcatcaccagaagggcttcaacgaggtctttggacatggctttaacacgaaacttagcagtgctgggcttgtttacaagcattttggtaaggagataattgcaaaggagcttcagcttaatgaggagcatgaagatgttcaccgtgtgtatcttgccatatacaaaagctttgttgaggcacttgatgcaatcgataatggaatcaatcaatatgacacagagcaaacccccaagtatgtgaacaatacacacttgtcttcacgtgttgggcgccttaatccagactggactgatccagatcaatcacctgagaaggaaaatgccgcatttcaaaaggcaatggcacttgccggaagtgagtttatggagagtgtccgctttcatgttaaatcgtggctacctgcaagatctattgtcatggagtgtttgctgtcaagaggaaatgttgatccaagtggagaaatcatggttttagatagattctgcccgtggaaacttcatctgtttgagctagagcaggagctgaagactgatcctctgaccaagtatgtgttgtatgaggatgagaggagcaaaggctggcgagtgcaggccgtctctgttgcacctgacagattcgagagccgaaaggctctcccagagaagtggaggggcatgagagatgatgaactgtccaaggaaaccggcatccctggctgtgtgttcatccatatgagtggcttcattggtgggaacaagacctacgagggagcgctggaaatggcaagagctgccctcaaatgctaattcaaccgaagcaacaagcagtaaaacagtcttacccatgttacgactgattgaggttcatatgcggcgctgcacttgcaccaattttattaccattgactagttggtatttgagtatgtatgttccgtggcgtgaaacatccacctgattagcagagattggtatccgtatgaggctgaacaagtagagttatatcatttgattaaagacgatgaaactcgttaatttgttgctcttcaccatttttttattactgctacaagcataagcgactgaata

SEQ ID NO: 4367 - DNA, 748 bp, Triticum aestivum
tcgaaggcaagctgcatccaggaagcagagcttaagcaagctatgctgacatggcagaagaacaaagaacagcgagaaacatatttctgagctgaatcaagaccttgccaatcttacaagcaagcttgaactgatattatcagagaaagacacagttgataacaagctggccactctactaactgacatcacagcacgtgatgaaaagatgaaacagatggatggccaccttagtcagcttcaacttgagcatgccaagatatcagcagagtccgctattgtgcatgagtccctgtcggagctgcgtgctcgggtttctgagctcgaggaacttgtggagaagcagaacctcgcgatctctgagggcgccgaggggaagcgtgaggcgattaggcagctgtgcttcacccttgagcattaccgcagcgggtaccagcagctgcgtgagatgctgcagcagggccacaggagaccaccgatgctgatggcagcctgaccaagtgtgtccttcttgttcccaatatccttttgtgcttacgaattgggttctgtagctttttcaattgagaagaactctgttatgtctgtgtgcaactacaatgtaatgtgaggatcatgtcagtcatggctcgcggaaaaaaagcaatcatgtccgtggtcttttgctcttgttacttctgttacattcttgtcatatattcaagatggtgaattctgtgttttggtctttaatgatgaagcggcgatg

SEQ ID NO: 4368 - DNA, 700 bp, Triticum aestivum
ttcatgagaggcctgaggagaaggttatcacagttggcatcgtcagcaatgcagagtaccgttacaaagagtcatcttgctgcgttaaggctgaatcagggctcggagtgggacttcgggtgttctcaggcatcgtcggcgtcgagaagcccgacccaacgatctacaagatcgcgctagagatggcggggaacgtcgcaccagaagaggcgctccacattggcgacagctaccgcaaggactatgtccccgcacgaagcatcgggatgcacgcgctgctcctggaccggttcaagaccgccgaagccgagagctggaggaagtctggcgcaccggtcctccctgacctcgaggccgcgcaggcatggctcaccaagaacccgacctaggaacccgctgaggagccactaggggccgcgctgctgcgcaggatggccgagaagctctgaatctcgcccctgggatagttcctgttgtgctcttgctgggcagtgagggagccaaggagaagggatgtgttgtagtgatggttcactggcctgtttagctagctggagctacttgaactctggtagtagcttcgggtactgttgctgactgctgaatgtggcaagtgattcagtcgtgcgacgaacatcttgcaacgacgaataattctaatcatgttttgcataatggagatatttaacatggttctgca

SEQ ID NO: 4369 - DNA, 1248 bp, Triticum aestivum
actcccgggaatgaatcagcttccccttccccttctctgagatctcagcccgagcctgcgcgccgcgacttccaccggaatccttccctcctagccgcaacatcgccggatcgattcaggcattcttggtggccggagaagcagtctttggtcctctgcttgagaatataactgttgttcagatcatcatcagacatgtcgctgctatcgaaattgcggctggttactgtggatgtgactggtactctgcttgcttacaaaggacggcttggtgattactactgcatggctgctaaggctgctggaaagccatgccctgattatgatcgaatgcacgaaggcttcaagcttgcatacactgagatggcaaggaaatacccatgctttggatttgcggcaaagatgccaacgattgaatggtggaggatttgtgtcaaggattcatttgttaaggctgggtatgattacgatgatgagacatttgataaagtgttcaagcgaatttattccgcctttggctcctctgcgccatactctgtttttcctgatgcacagcccttcatgagagggctgagggaaaaggggatcacagttggaatcgtcagcaatgcagagtaccggtacaaagaggtcatcttgcctgcgttagggctgaatcagggctcagagtgggacttcggggtgttctcaggcatcgtcggtgtcgagaaacctgacccaaaaatctacaagatcgcgctggagatggcggggaacgtcgcaccggaagaggcgctccacattggcgacagctaccgcaaggactacgtccctgcacggagcatcgggatgcacgcgctgctcctggaccggttcaagaccgccgacgccgagagctggaggcagtccggcgcgccggtgctccctgatctcgaagccgcacaggcatggctcaccaagaacccgaccgaggaacccgctgaggagccactaggggccgccactgctgcgcaggatggccgagaagctctgaatctcgcccctgggatggttcctgttgtgctcttgctggggagtgagggagccaaggagaagggatgtgttgtagcgatggttcactggccagtttagctagctggagctacttgaactctggtagtaggcttccagtgctgttgttgactgctgaatgtggccaagtgattcagccgtgcgacaaacatcttgcaatgacgaataattctaatcatgtttcgcataatggaggaa

SEQ ID NO: 4370 - DNA, 1199 bp, Triticum aestivum
cttcccctttcccttgtctgagatctcagcccgagcctgcacgccgcaacttccaccgaaatcctcccctcctagccgcagcgtcgccggattgattcagaaggcattcttggtggccggagaagcagtctttggtcctctgctcgagatcatcatcaaacatgtcgctgctatcgaagttacggttggtcactgtggatgtgactggtactctgcttgcttacaaaggacggcttggtgattactactgcatggctgctaaggctgccggaaagccatgccctgattatgatcgaatgcatgaaggcttcaagcttgcatacactgagatggcaaggaaatacccatgctttggatttgcggcaaagatgccaacgatcgaatggtggaggatttgcgttaaggattcatttgttaaggctggctatgattacgatgatgagacctttgagaaagtgttccagcgtatttattccgccttcggctcctccgcaccatactcggtgtttcctgatgcacagcccttcatgagagggctgagggagaagggtatcacagttggcatcgtcagcaatgcagagtaccgttacaaagaggtcatcttgcctgcgttagggctgaatcagggctcggagtgggacttcggggtgttctcaggcatcgtcggcgttgagaaacctgacccaaaaatctacaagatcgcgctggagatggcggggaacgtcgcaccggaagaggcgctccacatcggcgacagctaccgcaaggactacgtccccgcacggagcatcgggatgcacgcgctgctcctggaccggttcaagaccgccgacgccgagagctggaggaagtccggcgcgccggtgctccctgacctcgaggccgcgcaggcatggctcaccaagaacccgaccgaggagccactaggggctgcgctgctgcgcaggatggccgagaagctctgaatctcgccccctgggatagttcctgttgtgctcttgctggggagtgagggagccaaggagaagggatgtgttgtagtgatggttcactggccagtttagctagctggagctacttgaactctggtagtaggcttccggtgctgtggtgactgctgaatgtggcaagtgattcagccgtgcgacgaacatcttgcaatgacgaataattctaatcatgtttcgcataatggagaa

SEQ ID NO: 4371 - DNA, 959 bp, Triticum aestivum
gccgcaaaagggttatattggctatggatgctgcatttggcatggaatatttgcatgggaagaatattgtccatttcgatctcaagtgtgagaacctactggtaaacatgagagatccacaacgaccgatctgcaagattggtgatcttgggctatcaaaggtgaagcagcatactttggtgtctggtggtgttagaggaaccttaccatggatggcacctgagcttctgagtgggaaaagtgatatggtgtccgagaatattgatgtctactcatttggtattgtgatgtgggagctacttaccggggacgacccttattctgatatgcgtgcagctgaaattattgggggcatcgtgaacaattctcttcgtcctcagatcccttcctggtgcgatcctgaatggaaatcattgatggaaggtagttgggctggtgaaccagctcaaaggccatccttcactgaaatatctcaaaggttgcggaaaatggccgcggcaatgaatgttaaataaagggctcaatttattacaacgcgaagaggcatgtaaggaatcccatgtccagttccctgactagaggaaggcaaacccggaatatatgttacatgtgtcttggcagcgtctcggtttatcctagttgaaatgagattttatgaaggccttccatgggaggagaaactcatcacggacggttctaaagcgtatttgatgagtcgtcagctgccgccgtttgccttcaagtacgatatatatattgcatctgtccattcctcatgacgggaactgttggggtttgtaatgtaaataaattttggcccgctccgtccggcgcatggtaagaatgtggcacgggactagacacggtgcaaagctggacgcagttatccctttttctttcatacgattgtgtcctgagaaaaagagggaacgaactctggacaagagatatccttagtc

SEQ ID NO: 4372 - DNA, 820 bp, Triticum aestivum
gagctgcaggcgtggtggaaggaggtgcgcgaggtggggcacggcgacctcaaggtcgagccatggtggccgaggatgcaagccgtgggcgagctggccaaggcgtgcaccaccatcatctggatcgggtcggcgctgcatgcggcggtcaacttcgggcagtacccctacgcggggttcctccccgaaccggccgacggtgagccggcgccgcatgccggagccggggaccgagcagtacgcggagctggagcgcgacccggagcgggccttcatccacaccatcactagccagatccagaccatcatcggcatctcgctgctggaggtgctgtcgaagcactcctccgacgagctctacctcgggcagcgtgacacgccggagtggacctcggaccccaaggccctggaggtgttcaagcggttcagcgagcggctagtggagatcgagagcaaggtggtgggcatgaaccacgacccgcagctgttgaaccgcaacggtccggccaagttcccctacatgttgctctaccccaacacctccgatcagcaagggcgccgccgccgggctcaccgctaagggcatccccaacagcatctccatctgagcattcattgctacatactgcaccggcgccaaccacggcaaggcggcggccgacgttcatagtgatgagtgcgaataaagagtgtcgacacgtacgggaacgggaacatgttgatagactggtgctgtgtatgtgacactgtatgtgtgtgagttcatgtcagcaactgttcgatcctaagcgttaatcctcatgcatttggcaataaatga

SEQ ID NO: 4373 - DNA, 623 bp, Triticum aestivum
tgagccggcgccgcatgccggagcccgggacggacgagtacgcggagttagagcgcgacccagagcgggccttcatccacaccatcaccagccagatccagaccatcattggcatctcgctgttggaggtgttgtccaaacactcctctgacgagttgtacctgggtcagcgcgacacgccggagtggacctcggaccccaaggccctggaggttttcaagcggttcagcgagcggctggtggagatcgagagcaaggtggtgggcatgaaccacgacccggagttgaagaaccggaacggcccggccaagttcccctacatgctgctctaccccaacacctccgaccacaagggcgccgccgccggcctcaccgccaagggcatccccaacagcatctccatctgagcattcattgctacatacttctccggcgccaaccacggccaaggcggcgttcgacgttcttagtgatgagtgcgaataaagagtgttcgacacgtacgggaacgggaacgtgtcgacagactggtgttgtgtatgtgagactggatatgtgtgagctcgtgtcagcaactgttcgatgctaagcgttaatcctcatgcatttggcaataaataaag

SEQ ID NO: 4374 - DNA, 673 bp, Triticum aestivum
catccacaccatcaccagccagatccagaccatcatcggcatctcgctgttggaggtgctgtccaaacactcctctgacgagctctacctggggcagcgcgacacgccggagtggacctcggaccccaaggccctggaggtgttcaagcggttcagcgagcggctggtggagatcgagagcaaggtggtgggcatgaaccacgacccgcagctgttgaaccgcaacggcccggccaagctcccctacatgctgctctaccccaacacctccgaccacaagggcgccgccgccggcctcaccgccaagggcatccccaacagcatctccatctgagcatggtacatcggagcttcgtctcgtccacgccaaccacggtgcgtgcgcgtccgaataaagagcgtgcgactcgttcaccacgtacgggaacgtgtcgagagactagtgcagtgtgtgtgacactgtgtgtgagcttgtgtcagcaattgttcgatcacggtgttttttatttgtgtgttgctgttggccgtgtgcatcttagttatgcataggctggatgtgcttataaaaaaaattagcaataaataaagcatttaggtttccacggaaaccgtgtcatcataaagatgaattatgcacctgaacagacggagccggacttttcaactcgtaata

SEQ ID NO: 4375 - DNA, 821 bp, Triticum aestivum
acggggaaaggattctgcaaagcctccgaactcgcgacggggctgataatgaacaacatactgcgcatcggaaaggtgaatgtcatcggagacgtgatcctctacctgggaaagctgtgcgtgagcctgtccagcgtgctgttcgcgttcctcatgctggacacccacaagtacaggtctgctcacaacaagatatcgtctccgctgttccccgtgctgctgtgctgggcgctcgggtacgtggtggcacagctcttcttcggggtggtggaggcgtcggtggagacgataatcctgtccttctgccaggacgctgaggagcacgacggggaggcgcagtacgctcccccgctgctcatggagacgctgggcgacacgagccagctgcagaggctcacgcagggcccttgatggatcaaacctttgggcattgatcgactttggtagtgtagggttaccagaggcagctggttgggtgaatggctttgaccataataatactacgtgttatactattaattaactttgttgttaggtggaaatggaatgcaggcatgcctggctacggaccgtggaaaagacctctgctactagtgtcgatgaaatttcctttgtgatggggatggcaatcgggtaccggatggatggtggatgttgctccatgtctgaccgttcaacctatatccattctaggtataggtagtactggtactggctctcgttgttataatggaggtctagcaatgatgaaaggcgatcatcatggtgatgtgagcactggtgtaaagcaatggaatggatcctcgcaaaaaataaatgga

SEQ ID NO: 4376 - DNA, 784 bp, Triticum aestivum
  N_region (661)..(661): n = any nucleotide
tgacataccatttcataccgtggtgtcctccgtgaagcgtttgctgcgctacagccttggatctgtggctctaggttcactgatcgtatccagcgtggagtgggtgcggtgtatacttaaatcgctccgccgtaggctgaagggggttgattcaactggtgaaagccgcttggggaagacagtgtcatcctcatctcactgctgcttgggctgcatagactggaccatcaagtcagtgaaccggaatgcttatatcgtgattgccgttacagggaaagggttctgcaaagcctccgagctcgcgaccgggctgataatgaacaacatactgcgcatcggtaaggtgaacgtcatcggggacgtgatcctctacctcggaaagctgtgcgtgagcctgtccagcgcgctgttcgcgttcctcatgctggacacccacaagtacaggtctgctcacaacaagatatcgtccccgctcttccccgtgctgctgtgctgggcgcttgggtacgtggtggcgcagctcttcttcggggtggtggagacgtcggtggagacgataatcctgtccttctgccaggacgcggaggagcacgacggggaggcgcagtacgctcccccgctgctcatggagacgctgggcgacacgagccagctgcagagntcacgcaggggccttgattcgacccagcttctcggcattgatcgactttagtagtgtagggttaccagaggcagctggttgggtgaatggctttgaccataataatacgcactatatactact

SEQ ID NO: 4377 - DNA, 613 bp, Triticum aestivum
ccgtcgtcgtcaacaccacctacctcccaaacaatcgcgacgccgagatccgccgcaccctcaccgccgacggcaccctccggaagaagagggagatggcgacgcagcaggggatccaggagtcgtactacagggacatggccgtcatgttcggcaagtgggagttcgaccccatggcgctgccggagccgccgtgcccggtgcacctgtggcagggcgacgaggacggcctcgtgccggtcgcgctgcagcggcacgtcgccgggaggctcggctgggtcaactaccacgagctcccaggcaccggccacttcctgtccgccgttcccgggctcggagacaccgttctccggacacttttcggttgatcgaccaataccagacaagttagtttttagtccaagaaaacgtggagaagtgtttggcctttagctagcttggcgtacgaggcaaactggcaaagtgcaggacagtatgtctatttcttgattaatttatactactgtacatgggaacatgaggcagcatgtagattttgtatttcatactccttttttcattcgtttgtaatcaaaactatgctgacaaaaagcttagtagtaacatttttacc

SEQ ID NO: 4378 - DNA, 641 bp, Triticum aestivum
gcagttccggggcatcgcctttgggtggactgtgtgagggagaaagggaagagcggaaaggttgccggagctcaggctttggttatctgagaatgatggaagcgggcaagttccccgggataattggtgccgtaagcggccaggacggtggcgtcaacttctgcgacatggcatactaccagaagctaggggagggctccaccatgtccattgatagccttaacagcatgcagaccagcatgcacggtggttccataatgtctgtggacaacagtagtgttggttctactgactcgcgtactgggatgcttaaccatcctagccacaggggagctgttgctgtggtcagctactcggttgggaacagcattttccgtcctgggcgggtgtctcatgccttgagtgatgatgcgttggcacaggctttgatggacactagattcccgactgagacactcaaggattatgaggagtggaccattgatttggggaagctccacatgggattgccctttgcacaaggcgcatttgggaagctatacaggggggaaacggcaattaggatgacacattaagtttacggtgtcgcaactctgtgttgtaattcattctttagtgtagaagaggaagaagactgattg

SEQ ID NO: 4379 - DNA, 686 bp, Triticum aestivum
tataacagggaaacagaccagagccgtggatttgggtttgtcaccatgagtaccattgaagaggctgagaaggccgtggagatgttccatcgctatgacgtgaacgggaggctgttgactgtaaacaaggcagctcctagaggcgcccgggtggaaaggcctccccgtgattccgggtcttcattcaggatctacgtgggcaacctgccatggcaagtggacgactctaggttggtagagctgttcagcgagcacggcaaagttgtcgatgccagggttgtctacgacagagacactgggcgctcacggggatttggtttcgtgacaatggcatcacagccggaacttgatgatgccatcgctgccctcgatggacagagcttggaggggcgtgctctgcgggtgaacgttgcggaggagcggccaccacggaggttctaatgaaggtgtatttgatggtggactacgacaagattgctgcgtaagagacacgatagcacgcccaataccggcttagaccccccatccatccttgtgccatgtctgcctcctctctctccagtgtttttctcttttgctatctgcctgttgcttccacgttctcaatctgtcgatgcaattcaaaagttttgtctgacatactacatatgtttaagccccccatatggggtgcgtcgccctgagat

SEQ ID NO: 4380 - DNA, 1012 bp, Triticum aestivum
aagcaacatgatgcggacgatgctcagtcattctacactctgagctgggcttgtgacctgacggcacaccactgctagtggcagcaggaagcaatgcggtcattcgggtcatcaactggtgccaccgagaagttgtttaagagttttcttggccatggtgattcaataaatgagataagaactcaaccattgaagccttcgctcttcatttctgcaagcaaggacgagtctgttaggctatggaatgtccatacaggtatctgcatcttgatttttgctggaggaggaggtcaccgtaatgaagtattgagtgttgacttccacccttctgatatctaccgaattgccagttgtggcatggataatactgttaaaatctggtcaatgaaagaattttggccatacgtggagaaatcctttacatggactgaccttccatcaaaatttccaacgaaatttgttcaatttccgctcatgacttccgtggttcattctaactatgttgactgtactaggtggcttggtgacttcatcctgtcgaagagtgttgacaatgaaattgttctgtgggagccaaaaataaaagagcagggtcccggcgagggtagcattgatgttcttcagaagtaccctgtgcctgattgtgacatttggtttatcaaattctcatgtgattttcacttcaatcaattagccaataggcaaccgcgaaggcaaaatctatgtgtgggaagtgcaggcgagccctcctgtgctaattacccggctgagtagtccgcaatgcaaaatgccaataaggcagactgcagtgtcgtttgatggaagcacgatccttgcctgcggcgaggatggcagcatataccgctgggacgaagtggaacatcaagctgcaaaaaattgaagcaaccgaaaaccaccatgccgtgcgaccccatggcaatgccagccagtttgagcttgacttgggtagttgttgtgttgctacttagtgggttgtacccattacttagtc

SEQ ID NO: 4381 - DNA, 917 bp, Triticum aestivum
gcaacacaagaattttatccgcttaactgctgcccgtcgcaaatggaggcagcggcagcagcggctagctcctctgtcctgctgtcattttccagcccggggagatcaacggcggctaccttcctccgcctctccacggcgtcgcctcgcatcacatgctccgccacacagcagcttcccctcgctgcgccatggttgtaacctccgacaagagcagcagcagaagaagaagttcttgtcgctgaggtgctcctccgcttccaccggcagcccgtcggccgtcgtctcttcggaacgatggattcttgagcccgcaggagacggcgactggaaacacatcggctaccgcgtcgctcggcccggcgccatggagatcgcctccgaagcgataaccgtgggacgagttccggagaacgccgacgtcgtcatccccgtcgcgacagtttctggggtgcacgctcggctggagaagaaggacgggaacctggtggtcacggacatggacagcaccaacggcacctacgtcaacgagaggaagctggtgcccggattcccggttgccgtccaacccgggagcctcctcatcttcggtgacatccacttggcaatgtttcgggtgaggaaggagattgtcgatgtgccagccaaggccaccaaagatgaccagcaggaatctgagactgtgctggcaagtgcagttcaagaaacaagctagtgtaccttacctttcaaaataagggtgcaaaatagtgcatcatggtaatatacagtctccgtctctggatcgacaaaatatgtagctaggcagaaatagcttgcgagtaaacccatacaatttttgcaaagcataggcagattgtttctgctttatcaatgtccaacaaccatggaatggcaaacgggacagagccaataca

SEQ ID NO: 4382 - DNA, 1020 bp, Triticum aestivum
taatgagttaaccatacccacatggtagcaagcacgatggccaggataggacatttggacacctgccaatccatcacaatcagagctctcctatctcctccaccctccgtggggaggacacagcctctccacctgagcaacacaagaattttatccgcttaactgctgcccgtcgcaaatggaggcagcggcagcagcggctagttcctctgtcctgctgtcgttttccagcccgaggagatcaacggcggctaccttcctccgcctctccacggcgtcgcctcgcatcacgtgctccgccacacagcagcttcccctcgctgcaccatggttgtcagccgccgaaaagagcagcactagaagaagaagcagcatcctgtcgttaaggtgctcctcggccgccaccggcagcccgtcggccgttgtctcttcagaacgatggattcttgagcccgcaggggacggcgactggaaacacatcggctaccgcgtcgcccgccccggcgccatcgagatcgcatccgaagcgatgaccgtgggacgagttccggagaacgccgacgtcgtcatccccgtcgcaacagtttctggggtgcacgctcggctggagaagaaggacgggaacctggtggtcacggacatggacagcaccaacggcacctacgtcaacgagaggaagctggtaccgggattcccggtcgccgtccaacccgggagcctcctcatcttcggtgacatccacttggcaatgtttcgggtgaggaagacaatcgtcgatgtggcagccgaggccaccaaagatgaccagcaggaagctgagactgtgctggcaagtgcagttcaagaaacaagctagtctaccttacctttcaaaataagagtgcaaaatagtgcatcatggtaatatgcagtccccgtctcaggatcaacgaaatatgtagctaggcagaaatagcatgtacgagtaaagagtaacttgcaacatgtcatgctcaaggaacaggtcattcaaacaacaca

SEQ ID NO: 4383 - DNA, 765 bp, Triticum aestivum
catctcgttgctcatagagccgatgatgttgattactggcttcttcctcctgtttgttgcatgtattgcctacatgcacactgacatgtcaatctctaagaactctccttcttatctggcaaagctgcaatgggatgaggtgcaagccactgttcagcaaatccagggcatctttcaccagtgcttagctgttcatgataagctagagacatcattgcacgatttgtctaggtctggagacgctaaatcttgcaaagcagctcgtaaagccgctgatgcacagtttaaggaattagcgaaagagctgaagccgctgttgttatctgtacagtcatcccctcagtcttatcagatatggccaaagctagaggacttggttgcgaaggagagggagatgcaggagaagctcatggcgaggcatgccaccgtggttgacagcgtcgagaagaagcagcgcgggcaagacatagaaaaccggatttcctcccagcagcagaagatcgctgcgctgaggcaagaggtcgaatctcttctagagtaccttagcgagatatgagcgaatccggtctcatcttacatgattagtgattagactgaaggtcatcttctgcactttgtgtagatgttgtgttggtaacccattatcctagttcctgaggctaggtttcctagactctgtaatgtgatataagcgccttaatcattttggaactgattaatttttttgcatcatctaaaaagaaatcatggggaaccacccccttg

SEQ ID NO: 4384 - DNA, 652 bp, Triticum aestivum
tgttcatgataagtctagagacatcattgcactgatttgtctatggatctggagatgctaaatcttgctaagcagctcgtaaagcagttgatgcacagttgaaggaattagcgaaagagctgaagccactgtggttatctgtacagtcatcccctcagtcttatcagatatggccaaagctagaggacttggttgcgaaggagaaggagttgcaggagaagctcatggcaaggcatgccaccgtggttgacagcgtcgagaagaagcagcgcgggcaagacatagaaaaccggattgcttcccagcagcagaagatcgctgcgctgaggcaagaggtcgaatctcttctagagtaccttagcgagatatgagcggacccggtctcgttcctatatcattagtgattagactgaaggtcttcgtctgcacttttgtgtagatgttgtgttggtaacccattatcctagttcctgaggctaggttttgaatagaccgtgtataacatgatataagcaccgtaatcattttggaactgattagttttttttgttttgcatcatgataaaaagaaatcatgcggaaccaccccccctctggactcctttttcttaagtggtagcataattgttccagattagtggtgcatttgcat

SEQ ID NO: 4385 - DNA, 757 bp, Triticum aestivum
atagaccgatgattttgattactgggcttcttcctcctgtttgttgcatgtattgcctacatgcacactgacatgtcatctctaagaactctccttcttatctggcaaagctgcaatgggatgaggtgcaagccactgttcagcaaatccagggtatctttcaccagtgcttagctgttcatgataagctagagacatcattgcacgatttgtctaggactggagacgctaaatcttgcaaagcagctcgtaaagccgctgatgcacagtttaaggaattagcgaaagagctgaagccgctgttgctatctgtacagtcatcccctcagtcttatcagatatggccaaagctagatgacttggttgcgaaggagagggagttgcaggacaagctcatggcgaggcatgccaccgtggttgacagcgtcgagaagaagcagcgcgggcaagacatagaaaaccgcggtggcatcccagcagcagaagatcgctgcattgaggcaagaggtcgaatctctcctagagtaccttagtgagatatgagcgaatccggcttcatcctatatcattagtgattagactgaaggtcatctgcactatatgtgaagatgttggtaaacccattatcctagttcctgaggctaggttttgaatagaccgtgtaacatgatataagcaccgtaatcattttggaactgattaacctttttgcatcatgataaaaagaaatcatgggggaccgcccccttgggactcc

SEQ ID NO: 4386 - DNA, 738 bp, Triticum aestivum
ccagacgaacagggctcgcaacggtgagctgtatcgctacattgctgatactcatggtgcctttgtgcagccagctttgtatgaagcatttggtctcactgttgtggaagccatgacctgcggactccctacttttgcaacactccatggagggcctgccgagattatagagcacgggatctctggtttccacattgatccttaccatcctgatcaggctgccacgttgatggctgacttctttgaaaaatgcaaacaggaccccaatcattgggttaagatatctgacagaggcctccagcgcatttacgagaagtatacatggaagatttactccgagaggttgatgacactggctggagtttatggcttttggaagtacgtttcgaagcttgaaaggcgggagactaggcgttatcttgagatgttctacatattgaagctccgtgagctggtgaagagtgtgccgcttgcaatagatgaggcgcattaactgttccgtctccaataaaagtcatctacttatttgtccagcgatcggtgaactcgccttttttactttacattgcgagtgttgaactggggtttgagtgtgctcgctatgtacatgagtgattgatacactgttggcaaattgtattttgccacgttgcttgtatttttaaagcttctgctaagacagaattcactagcctgctatctcatgtggaatctgctctactattttttgaccccgtt

SEQ ID NO: 4387 - DNA, 855 bp, Triticum aestivum
ggaaaatgtcaggttttgggcaccgtgtgtataagaattatgatcctcgtgctaaagtcatccgaaagttagcagaggaggttttctctattgttggacgggatcctcttatcgaggttgctgttgctttggagaaggcagcactgtcagacgattattttatcaagaggaagctgtatccaaatgtggatttttactcaggcctgatttacagagcgatgggattccctacagaatttttccctgtgttatttgcaattcctcgcatggctggttggctagcacattggaaggagtcacttgatgaccctgacaataaaattatgaggcctcaacaggtatacacgggcgtttggctgaggcactacacccctgtgagggaacgagtggcatctaaccagggcgaggagctcggtcagatcgctgcatcaaacgcaacgaggcgtcgccgtgctggttcttccctgtagaacagcagcaggcacggatgcatggtgcagcatccagcccacgcaataaaccaggctgctgtcgttgcccctcacaacgccgcagcggctcgagtccgggagctgttatccttctggtgtcaccaagacacttagcagttgccatgcaataaacttctagtaaaaggcacgctgtggacactatctatgcacacacttccagtttccagcttcatctctgcatgcatgcaatgtgagctcatgattggaaaaaataatcatactccctccgtcccaaaataagtcttaactttagagggagtagttgatggcatgtcggtcttcgtaagagtgtgcatattagtgcggtgcgtaggattcgatcctggccagcaatgaaaaatca

SEQ ID NO: 4388 - DNA, 573 bp, Triticum aestivum
gaagcttgtggccgcaggatcaatggattcgtcaaacgtgctagagctgccaagatacatgcttatataattgggcatctaaagaatcagatgcctacgatgatggggaaagctaaagcccagcagaaacttatagacaatttggagggcgagtttgcaaaggtgcaaagggagcatcatcttccagcaggggatttcccttacgtggagcacttcagagaagcattgggcgggtacagcatcgacaggttcgagaaggtgaagcccaagatgatccaggcggtggacgacatgctcgggtacgacatcccggagctgctcaagaacttcaggaacccttacgagtgagcagacatcatgatggaaagaccggcttcggtctcaggcgtagatggtggtagccagtctagtagggtattttattgctatattgtacccattgctgtgtaactgtatgcataagagccagaagcaattgctcaattgttggctggagaacggccttgttgtaatggcatggaaagaattcggaatatggtatggtggggtggtcgcgttgatccttgagatgat

SEQ ID NO: 4389 - DNA, 804 bp, Triticum aestivum
tgagtttcgcgcgttatatattggatcgttcaatgataaccagtaaaggaatcagctgttgggcccgatcggaaaggaactatttgagaaagagcaggatgatctcctttctgatctaaaagatataccaaagaaagcttgtgaccgcaggatcaatgaattcgtcaaacgtgctagggctgccaagatacatgcttatataattgggcatctaaagaatcaaatgcctacgatgatggggaaagctaaagcccagcagaaacttatagacaatttggagggcgagtttgcaaaggtgcaaagggaacatcatctccccgcgggggatttcccttacgtcgagcacttcagagaagcattgggcgggtacagcatcgacaggttcgagaaggtgaagcccaagatgatccaggcggtggacgacatgctcgggtacgacatcccggagctgctcaagaacttcaggaacccttacgagtgagcagacatcatgatccgaagaccggcttcggcgtgtcaggcgtggatggtggtgggtgcccatagagttgcggctgccagtctactagggtatttattgctacactgtacccattgttgtgtaactgtatgaataagagccagaagcaattgctcagttgttcgctggagaacgcccttgttgtaatggcatggagagagttcggaatatgggatggatggtatggtggccgtactgatccttgagatgattgtctattcgttccgaggaacagcttgaatgctttgctggtgcgatccagtcaactggctacccatgaagag

SEQ ID NO: 4390 - DNA, 645 bp, Triticum aestivum
caggatgatctcctttctgatctaaaagatataccaaagaaagcttgtgaccgcaggatcaatgaattcgtcaaacgtgctagagctgctaagatacatgcttacataattgggcatctaaagaatcagatgcctacgatgatggggaaagctaaagcccagcagaaacttatagacaatttggagggcgagtttgcaaaggtgcaaagggaacatcatctccccgcgggggatttcccttacgtggagcacttcagagaagcattgggcgggtacagcatcgacaggttcgagaaggtgaagcccaagatgatccaggcggtggacgacatgctcgggtacgacatcccggagctgctcaagaacttcaggaacccttacgagtgagcagacatcatgatcggaagacggctttggttcgcagttcgacatgtcaggcatggatggcggtggctgcccatagggttttggctgccagtgtagtagggtgttcattgctactgctacattatacccattgttgtataactgtattatgcataataagagccagaagcaattgctcagttgttcgctggagaacggcctttattgtaatggcatggaagtcggaatatgggatggtggttgtatcttatcctgcag

SEQ ID NO: 4391 - DNA, 718 bp, Triticum aestivum
ggttccgcgactgcgccggatacgccgcagagccgcgaccagtggcgctgcgcgttgcgcaccacgccccccgcatcatacactggtggatggagcagagctgctgcccctgcccacctccaccgtcgtcgtcaacactacctacctccccaacaagcgcgacgccgagatccgacgcaccctcaccgccgacgacaccctccggaagaagagggagatggcgacgcagcaagggatccaggagtcgtactacagggacatggccgtcatgttcggcaagtgggagttcgaccccatggcgctgccggagccgccgtgcccggtgcacctgtggcagggcgacgaggacggcctcgtgcccgtcgcgctgcagcggcacgtcgccgggaggctcggctgggtcaactaccacgagcttcccggcaccggccacttcctgtccgccgttcccgggctcggagacaccgttctccggacacttttcggttgatcgaccaataccagacaagtagttttagtacaagaaaacgcggagaagtgttggcctttagctagcttggcgtacgaggcgggacagtatgtctatttcttgattaatttataccactactgtacatgggaacatgaggcagcatgtagattttgtatttatactccttttttcattcgtttgtaatgaaaactatgccgacaaaagcttactagtgacatttttacc

SEQ ID NO: 4392 - DNA, 1101 bp, Triticum aestivum
tttcggtctcagtaccatttctgaatgcagaaggcttgacgggttgctccacacatcctgtggtacgcctgcttatgttgctcctgaagtaatcaataggaaaggctatgacggcgccaaggctgacatctggtcatgcggggtgatcctctttgtgcttttggctgggtatctccctttccaagataagaatctgatgaatatgtataagaagattgggaaagcagagttcaaatgcccgagttggttctcttcagacattcgaaggcttctgctaaggattcttgatcctaaccccagcacaaggatctcgattgagagaatcatggaacatccttggttcaggaagggtctagatgcaaagctgctcagatacaatttacaagcaaaagatgccgttcctgctgctgacatgactgcgacttctgattccttgagctgcagcaactcagcaacagagggcaaggaacaagaagcaaaaaagctctccaacttgaatgcttttgatataatctccctctcaactggactcgacctctccggtatgtttgaggacaatgacaagaagagggagtccaagttcacatccaccaactcggcttcgacgatcgtgtcaaagatcgaggacatcgcaaagtgcatgcgactgaagctcgtcaagaaagatggtggcatgatgaggatggaaagcttcaagcctggaaggaaaggtgtgatgtccattgatgctgagatatttgaggtcacccctgacttccatctcgtggagttgaagaagacaaacggtgatactatcgagtaccagaaggtcttgaaccaggagatgaggccagcgctcaaggacatagtctgggcgtggcaaggcgagcagcagccgcagccgcagccgcagccacagcagcaaccatgttaagaagaactgtgccaggtgcaacattttgcaactcgaggcaatcaattaccaggcgtccgtgtgtttctgtaatttttattatccatgtttgctattcgtttgcattcccctagtgatgtctgtgtaaacttcagttatcatctttcgatgaagatttatttaaaagcatggtgtcttcagaacagatg

SEQ ID NO: 4393 - DNA, 855 bp, Triticum aestivum
attctgatccaaaccccagcacaggatctcgatgagagaatcaggacatccgtggttcaggaaggtctagatgcaaaactgctcagatacaatttacaagcaaaagatgccgttcctgctgctgacatggctgcgacttctgatttccttgagctgcagcaactcagcaaccagagggcaaggaacaagaagcaaaaaagctcgccaacttgaatgctttcgatataatctccctctcaaccggactcgacctctctggtatgtttgaggacaatgacaagaagagggagtccaagttcacatccaccaactcggcttcgacgatcgtgtcaaagatcgaggacatcgcaaagtgcatgcgactgaagctcgtcaagaaagatggtggcatgttgaggatggaaagcttcaaggctggaaggaaaggtgtgatgtccattgatgctgagatattcgaggtcacccctgacttccatctcgtggagttgaagaagacaaacggtgatactctggagtaccagaaggtcttgaaccaggagatgaggccggcgctgaaggacatagtctgggcgtggcaaggcgagcagcagccgcagccgcagcagcaaccatgttgagaagaactgtgccaagtgctacattcattttacaacttgaggcaattaccaggcgtccgtgtgtttctgtaatttttattatcgtaagtttgttattcgtttccattcccctagtgatgtctgtgtaaacttcagttatcatcttttgatgaagatttatttgaaagcatggtgtcttcagaacagatgccaagtctttgtccaaaggctctccagggcagtgcgtttgtgtatggga

SEQ ID NO: 4394 - DNA, 807 bp, Triticum aestivum
gattcttgatcctaaccccagcacaaggatctcgattgagagaatcatggaacatccttggttcaggaagggtctagatgcaaagctgctcagatacaatttacaagcaaaagatgccggtcctgctgctgacatgactgcgacttctgatcccttgagctgcagcaactcagcaacagagggcaaggaacaagaagcaaagaagctctccaacttgaatgcttttgatataatctccctctcaactggactcgacctctcaggtatgtttgaggacaatgacaagaagagggagtccaagttcacatccaccaactcggcttcgacaatcgtgtcaaagattgaggacatcgcaaagtgcatgcgactgaagctcgtcaagaaagatggtggcatgatgaggatggaaagcttcaagcctggaaggaaaggtgtgatgtccattgatgcagagatattcgaggtcacccctgacttccatctcgtggagttgaagaagacaaacggtgatactatcgagtaccagaaggtcttgaaccaggagatgaggccggcgctgaaggacatagtctgggcttggcaaggcgagcagcagccgcccccgccgccgcaatcatgttaagaagaactgtgccaagtgcaacatttttacaatccgaggcaattacaaggcttccgtgtgtttctgtaatttttattatcgaaagtttgttattcgtttgcatgtctgtgtaaacttcagttgtcatctttcgatgaagatttatttaaaagcatggtgtctttagaacagatgcctagtcttta

SEQ ID NO: 4395 - DNA, 741 bp, Triticum aestivum
tattctgaggcagacgcgtaaaacgcagaatcagcggtgattcttcccccggtgctctttctgcttttctcggcatttctccttggtgccatcttcaaaaaagtgttgcaacatcttgacttacccattaatcaggtgcaaggtcatgattcaggctgcagaccccgatgaggacgacgaggacgaatctgaaaagccaggcaattcaaggcctcccaaacaatgttgggcgccatgcatgcaatgtggaacaaggaaggcatcccagggttcttcaaagggttacatgctcagatactaaagacagttctgagctccgcattactgctgatgataaaagagaagatttcaaagttcacttggatctcgctgcttgccctgcggcgatatctctttgtttctcggaagagaatcaagagtgcatagttgtatcatgcatatgtcagacctgagaaaaccagtctaatcgtccactggtatttcaagatcgtattataccaaataacagaagtacagaagcagaacagcacgatcatcttgagagcgccatggaatgttctgaataaatttgtttgtttttccatgtagtagctctgagcatctgattcgtacttggaatgtaatggaatgaagtggaataggtgttgtccagaagtagttctggtgatgtgattgtggtctggtagactggtaccatacgtgtaaaatatcacttttgttctattctttcctttctttgct

SEQ ID NO: 4396 - DNA, 678 bp, Triticum aestivum
gtgattcttcccggttgctctttctgctttctcggcatttctccttggtgccatctcaaaaagtgttgcgacaatcttgacttacccattaatcaggtgcaaggtcatgattcaggctgcagaccccgatgaggacgacgaggacgaatctgaaaagccaggcaattcaaggcctcccaaaacaatgttgggcgccatgcatgcaatgtggaacaaggaaggcatcccagggttcttcaaaggattgcatgctcagatactaaagacagttctgagctccgcattactgctgatgataaaagagaagatttcaaagttcacttggatctcgctgcttgcgctgcggcgatacctctttgtttctcggaagagaatcaagagtgcataattgtattatatatttcagacctgagaaaaccagtctaatcgaccactggtatttcaagatctcatactaccaaataacagaagtacagaagcggaacagcacgatcatcttgagagcgccatggaatgttctgaataaatttacttggttttttcccgtgctctgtgcagaagtagttctggtcaggttctggtgatgtgattgtggtttggtagactggtaccatacgtgtaaaaatatcacttttgttctattctttctttctttgctggaattgaagcatagcataa

SEQ ID NO: 4397 - DNA, 1054 bp, Triticum aestivum
caccgtggttgaccagcttaacagaagctattctgaggcagacgctgtagaaatgcagagtcagcatggcgattcttccccagttgctcttttctgctttctcggcatttctcccttggtgcccatctcaaaaagtgtgcaacaatcttgacttacccattaatcaggtgcaaggtcatgattcaggctgcagaccccgatgaggacgacgaggacgaatctgaaaagccaggcaattcaaggcctcccaaaacaatgttgggcgccatgcatgcgatgtggaacaaggaaggcatcccaggcttcttcaaaggattacatgctcagatactaaagacagttctgagttccgcattactgctgatgataaaagagaagatttcaaagttcacttggatctcgctgcttgccctgcggcgatacctctttgtttctcggaagagaatcaagagtgcataattgtatcatacatatgtcagacctgagaaaaccagtctaatcgtccactggtatttcgagatcttatactaccaaataacagaagtacagaagcagaacagcacgaatcatcttgagagccccatggaattttctgaataaatttacttggttttttcctgtagctctgagtatctgatactttgaatggaatggaataggtgttgtacactgtccagaagtagttctggtgatgtgattgtggtctggtagactggtagtactatacgtgtaaaaatatcacttttgttctattctttctttctttgctggagatgaagcaatagcaataaatctttcatgttgtaagtttcgcgccctaccctaaggcttaatgtcgaaagaattttcgcttggcgcattcaaattttgctttggcaatggcacgcggaccgccgggacgagcaggaggtcgaagcgccggcgcgtggtgagccccagcagctcggccatgtccagctccccgggctccggcccgtccggcagctcccagtcgaagtggtagagaaggctggcgagcgcgagctccatgtgtggcagccgaacgccatcccgg

SEQ ID NO: 4398 - DNA, 651 bp, Triticum aestivum
tcagctcttcccccgtcgcgagcgccaagaagctgcagcgcgagagggagatgctggcgaggcagatgcagaagcggctgtccgtggaggagaggaaccacatgtacaccaaatggagcgtgtcgctggactccaagaagaggaagctgcaggtggctcgccggctgtggacagagagcagggacctggagcacgtgagggagagcgcgtccttggtggccaagctgatcgggctccaggagcccgggcaggtcctgagggagatgttcgggctcagcttcgcgccgcagcagccccccgcccggcggtcctccaacggctggagatacgggatcccctcgtttggctgattgattgggcccctgacgacaagaggcaagaagatgacaggatgatgcggctgaccaaaagatctttttttttctctggtggttttgtatcttggggtgttgcctgttctgattttccatagggtatcaggacacgcgcatgcggggggtttgatcttggtgcatgccctttgcgtgtaggacgaccggtttggtgcgcggttcctgagcaggcgccgccggtctgattgctaacattattaacgtatcactgcgtatccagagacacgctcttttgttaacgtgttgttgcattcccacg

SEQ ID NO: 4399 - DNA, 750 bp, Triticum aestivum
gacggccttcgccgccgttaccgtgcggcttctctacagctcctcccttgccgagccgaggtccatcccgtccaagtccatgtaccccaccttcgatgttggtgatcggattctcgctgagaaggtgtcatatgtattccgggaaccagaaatcttggacattgtcatcttccgtgctcccccagctcttcaggatatgggctacagctccggtgatgtgttcatcaagaggttttgccaagggaggggactacgtcgaagtgcgtgatggcaagttactggtcaacggggtacttcaagatgaagaatttgtgctggaggcacacaactatgagatggaaccattgcttgtaccggaagggtatgtgtttgtgctgggagacaaccgtaacaacagcttggactcccataactgggggccgctcccggtgaggaacatacttgggagatccgtgttccggtactggccaccgtcgaagataacggatacaagatactaccaacccgatgcggcgctctacgcggtggggatgtcgtgacgactcgtgcctccggtgatgctgtggcaaccaacgcgctccgccgatgggctgagcttcaatcctcttgtttcattgagagtttgtatttagaactgtggatgaattcctgttccgttcgtttttcgctgcctactggcaggcgcttgttgaataaccacgaaaagcatggttatgtgtagagagagagagagcagctgctgagggagca

SEQ ID NO: 4400 - DNA, 660 bp, Triticum aestivum
cgcgcttactgctaccaatccaagctggatgaactgagcactatcgccgttgccaagggcgatatcggtgatggagaagacgtgctggtgagggtgcattcagagtgcctgaccggcgacatcctcggctccgcccgctgcgactgcggcgagcagctggacctcgcgatgcagctgatcgagaaggccggtcgcggcgtcctcgtgtacctgcgcggccacgaaggccggggcatcgggctcggccagaagctccgcgcgtacaacctgcaggaccaaggcagcgacacggtggaggccaacgtcgagctcggcctcgccatcgactcccgcgagtacggcatcggagcccagattctgagggacattggcgtgcgcacgatgcggctgatgacgaacaacccggccaagttcgttgggctcaaggggtacgggctcgccgtggtgggccgggtcccggtgatctcgccgatcaccaaggagaaccagaaatacctcgagaccaagaggaccaagatggggcacctctacggctccgaccttcccggcggcctcctcaaggaattcctcaatcctacggaagacaacgccacgaactaattatacacccaccacacgatccgcatatcattttctgtaacttcattctttctgatataa

SEQ ID NO: 4401 - DNA, 718 bp, Triticum aestivum
gagatgattgacgatgacatctacgtcgggcagagaacagctacaacctcttcactgtgcgcaagaatagcgacgcggccacagacgaggagaggggtaggctggaggtgtcggggagtaccacctcggagagtttgtcaacagatttccggcacggctcgctggtgatgcgcctccctgactcggtagatgggccagatccccacggtcatctttggcaccatcaatggggtcatcggcatcatcgcctccctgccccacgaccactatgtgttcctggagaagctccagacaaccctggtcaagttcatcaagggtgtgggcagcctgagccacgagcagtggcggtcattccacaacgacaagaagacgtcagaggcccgcaacttcctggacggtgacctcatcgagtcgttccttgacctcaacaggtccaagatggaggaggtggccaaggcgatggcggtccccgtggaggagttgtccaagcgggtggaggagctgatgagactgcactaggtggtagcgccgggccgtgtatatcctgttttatttgttcgttttcgctgtgttgtaaaccgttggcggctcgagaatggtcctctgcaagtgtttgtagcaacatccctcttctgtttttgactttgataagagtgtaactttgtctgtgctgatgtagaattttagtggtgaatctctctgtcgaaatggtatcaag

SEQ ID NO: 4402 - DNA, 806 bp, Triticum aestivum
gatcaagagctgctaggactacaacccaactggatgactgcagtgagatgatgagacgacatctatgtcggtgcagagaacagctacaccttttcaccggcgcaagaacagcgatgcagccacagatgaggagaggggcaggctggaggtggtcggggagtaccacctcggagagtttgtgaacaggttccggcacgggtcgcttgtgatgcgcctcccggactctgagatgggccagatccccacggtcatcttcggcaccatcaacggggtcatcggcatcatcgcctccctgccccacgaccactatgtgttcctggagaagctccagacaaccctggtcaagttcatcaagggcgtgggcagcctgagccacgagcagtggcggtcgttccacaacgacaagaagacgtcggaggcccgcaacttcctggacggcgacctcatcgagtccttcctcgacctcaacagggccaagatggaggaggtggccaaggcgatggcggtccccgtagaggagctgtccaagcgggtggaggagctgatgagactgcattaggtggtagcgccgggccgtgtatatcctgttttattcgttcgttatcgctgtgttgtaaaccgttggcggcttgagaatgatcctctgcaagtgtttgtagcagcattccttttctgttttttgactttgataagagtgtaactttatctgtgctgatgtagaattttagtggtgaatcgccgtggtttatgtgcaattgtcaacatgacacccagaaagtttggcataattgttaggcgtatgtaaa

SEQ ID NO: 4403 - DNA, 674 bp, Triticum aestivum
cagacgaggagagggcagctggaggtagtcggggagtaccacctcggagagtttgtgaacaggttccggcatggctcgctggtgatgcgcctccccgactctgagatgggccagatccccacggtcatctttggcaccatcaacggggtcattggcatcatcgcctccctgccccacgaccactatgtgttcctggagaagctccagacaaccctggtcaagttcatcaagggtgtgggcagcctgagccacgagcagtggcggtcgttccacaacgacaagaagacgtcggaggctcgcaacttcttggacggcgacctgatcgagtcgttcctcgacctcaacaggtccaagatggaggaggtggccaaggccatggcagtccctgttgaggagctgtccaagcgggtagaggagctgatgagactgcactaggtggtagcgccgggccatgtatatcctgttttatttgttcgttttcgctgtgttgtaaaccgttggctgctcgagaatgatcctctgcaagtgtttgtagcaacatcccttctctgtgataagattgtaactttatctgtgctgatgtagaactttagtggtgaatctctcttgttgaaatggtatcaagaaagtttggcacaattactaggtgaacgtagacggtgataaccatctgg

SEQ ID NO: 4404 - DNA, 575 bp, Triticum aestivum
ctacgacgatggctctgtccaaaagattactgagatcccagatgatctgaaagcaatttacaagactgtttgggagatcaagcagaaaactgttgttgacatggccgtcgatcgtggctgctacatcgatcaaagtcagagcctcaatatccacatggatcaagcaaactctgggaagctaacttccctgcacttccacgcttggtccaagggcctgaaaacagggatgtactatctgaggacacgtgctgctgcggatgcgatcaaattcacagtggacactagtcttctcaaggataagaagcctgcgaatgccgaggaggaagaggatctccaggccaagatggcgcaggtgacctgctccctgtacaaccgtgaggactgcttgtcatgtggaagctagattcgtccgcgacaccctacgctaacctatactatcgtcttactgttggcttgtcgttggattcagatgatatatctctgcctatgcatgatgagctcatgaattaaaaagcaagccttgctcctagacactctgaactcatggtatcgtgtctgtatatatatatagccac

SEQ ID NO: 4405 - DNA, 677 bp, Triticum aestivum
tgcttccgtatgccgcctgggtcaagaatgacacgctcagcttcgagatcaatggcgaccctggaaaggaggatgaggctaaggccagtggccgtggcatggggcgcatccgccccacggccggtaagaagatgtccggcaaggtgcgcagtgtgcaggcatttgatttcgccgagtggctgaagcagacggtgtcggagcaggactacgtggtgatgaagatggatgtggaggggactgagtttgacttgatcccgagactcttcgacacgggcgcaatctgcttggtcgacgaggtgttcctcgagtgccattacaaccggtggcaaaggtgctgccctggcgagcggtcgcccaagtatcagaacacatacgaggagtgcctggagctcttcagctcgctccgggagagcggcgttcttgtgcatcagtggttttgattgctgccatacacattcagaattgctgcagatagagttcgactacagaggatacaatggttccatacttgcactacatatctgattttgaaagtatattagtttcattgtgaagatagggattaagggattcggtttattctctgcttgttagttagatcttgtagttaaaaagatttgaggaaaagaaaggtagcgtttaactgcattcccagtcaaattctgcggattgcgatg

SEQ ID NO: 4406 - DNA, 729 bp, Triticum aestivum
aaggaaggggttcacattgcttccctatgccgcttggtcaagaatgacacgctcagcttcgagatcaatggcgaccctgggaaggaggatgaggctaaggccagtggccgtggcatggggcgcatccgccccacggccggcaagaagatgtccggcaaggtgcgcagcgtgcaggcatttgatttcgccgagtggctgaagcagacggtatcggagcaggactacgtggtgatgaagatggatgtggaggggactgagtttgacttgatcccgaggctcttcgacacgggcgcgatctgcttggtcgacgaggtgttcctcgagtgccattacaaccggtggcaaaggtgctgccctggcgagcggtcgcccaagtatcagaacacatacgaggagtgcctggagctcttcagctcgctccgggagagcggcgttcttgtgcatcagtggttttgattgctgccatacacattcagagttgctgcagatagggttcgactacagaggacaaaagggtttcatacttccagtacatgtttgatttccaaagtatattagtttcattgtgaagatagatagagattaagggatttggtctattctctgttggttagttagttagaccttgtagttaaaagaagatttgaggaaaaagaaaggaagcgtttaactgcattcccagtaaaattctgcggattgctattgttactgttattgagcaaaggaatt

SEQ ID NO: 4407 - DNA, 815 bp, Triticum aestivum
  N_region (625)..(645): n = any nucleotide
gagattctacacctctcagattgctgctgccgagatgtctaacccatctgctgcaactgggcagcgaggcaatactggtaagctgtctaaccttggggacagcgccaggaaacagtatttaagagagcatcggtcgagttcaagatacagccaactcgctgctgccgaccagtctgacaaacccaaatggtcgcaatcgcatcaattccaagaaagaccgtcatcttcccatcggaaggatgaagtggtggcagataaggagcctacaggggtgaatggcacgaggaagaaccgaatccagtactcaggaccattgatgcctcccggggtaaacatggaggagatccttaaagagcacgagcggcagatccaacaagccgtgcgaagggctcgtctggacaagggaaagggcaagcacgccgagagagaccagtcggagtcgctgctctacgctgcccataatggcaggtcatagcgccgcgaagctcggctcggtgttgttgatggcttcggcaatggaaagtagtgtatgatccccttattttttacgcccccgtcgagcggagaggtttgttctgccggcagctcccacaccattgcgccagtggactggtggttcctggcnnnnnnnnnnnnnnnnnnnnngcctgctcttgctcatgtagagattttcgccaagtttagcaagatattcgctggaaaaatttgttgcccacacagtcaccaattgtatatctcagagatgagtacccaccctcttttgaggattgatgattcttacacctgtgttttggtaggtgccaagagaaatataa

SEQ ID NO: 4408 - DNA, 723 bp, Triticum aestivum
tggggacagcgccaggatacagtatttaagagagcatcggtcgagttcaagatacagtcaactcgctgctgccgaccagtctgacaaacccaaatgggtcgcaatcgcatcaattccaagaaagaccgtcatcttcccatcggaaggatgaagtggtggcagataaggagcctacaggggtgaatggcacgaggaagaaccgaatccagtactcaggaccattgatgcctcctggggtaaacatggaagagatccttaaagagcacgagcggcaaatccagcaagccgtgcgaagggctcgtctggacaagggaaagggcaagcacgccgagagagaccagtcagagtcgctgctgtacgctgcccataatggcaggtcatagcgccgcaaagctcggctcggcattcttgatggcttcggcaatggaaagtagtgtatgatccccttattttttacgcccccgtcgagcggagaggtttgttctgccggcagctcccacaccattgcgccagtggactggtagttcctggcagcaagaagaagaagaaggcctgctcttcactcatgtagagattttcgccaagtttagcaagaaagatattcgctggaaaaatttgttgcccacacagtcaccaattgtatatctcagagatgagtacccaccctcttgaggattgatgattcttacacctgtgttttggtaggtgccaagagaaatataa

SEQ ID NO: 4409 - DNA, 671 bp, Triticum aestivum
gcggcctcatggactacgccttccagttcatccacaagaacgggatcaccaccgagtccaactacccgtatcaaggcgagcagggcagctgcgacctggcaaaggaaaaggctcatgccgtgacaatcgacggctacgaggatgtccccgccaacgatgagtctgccctacagaaagccgtcgcaggccagcccgtgtccgttgcaatagatgccagcggcaacgacttccagttctactcagagggcgtcttcactggagaatgcagcacggatctcgaccacggtgtcgccgccgtcgggtacggcactactcgggatggcaccaaatactggatcgtgaagaactcgtggggagaggactggggtgagaagggctacatcaggatgcagcgcggggtgtcgcaggcagaggggcagtgtggcatcgccatgcaggcgtcgtacccaactaagtcggcaccacgtgctagggcagtcagggaagggtctcatactgatgagctctgatggcacacatacgatcattcggagtgcaacctctgcgttgaggagaactgaatctcccactgttgtgttatttactttatgcaagatgttactatgaatgtaataaacgtaggcaaaggacattatagcaaaagaattgcaactaatttgtcaaatcaaatg

SEQ ID NO: 4410 - DNA, 776 bp, Triticum aestivum
ccaatcttgaatttcattgaatcatttgacaaattagttgggattctttgctataatgccctttgcttacgcttattacattcgtatggtaacatcttgcataaagtaaataacacaacagtgggagattcagttctcctcaacgcagagctcgcactcggaatgatcgcatgtatgcatgtcatctagagctcatccgtatgagacccgtccctgactgtgctagcatgtggtgccgacttcgttgggtaggacgcctgcatggcgatgccacactgcccctctgcctgcgacaccccgcgctgcatcctgatgtagcctttctcaccccagtcctctccccacgagttcttgacgatccagtatttggtgccatccctggtagtgccgtacccgacggcggcgacgccgtggtcgagatccgtgctgcattctccggtgaagacgccctctgagtagaactggaagtcgttgccgctggcgtctattgccacggacacgggctggccggcgacggctttctgtagagcggactcgtcgttggcggggacgtcctcgtagccgtcgatcgtcacggcatgagccttttcctttgcctggtcgcagctgccctgctcgccttggtacgggtagttggactcggtggtgatcccgttcttgtggatgaactggaaggcgtagtccatgaggccgccgtcgcagccctggttgttgacgttgtcgcagtccatgagctcctgctccgacagcgacacagcttcccgtcctgatcttgt

SEQ ID NO: 4411 - DNA, 775 bp, Triticum aestivum
agatcagcacggggaagctgtgtcgctgtcggagcaggagctcatggactgtgacaacgtcaacaaccagggctgcgacggcggcctcatggactacgccttcctagttcatccacaagaatgggatcaccaccgagtccaactacccgtaccaaggcgagcagggcagctgcgaccaggcaaaggaaaaggctcataacgtgacgatcgacggctacgaggatgtccccgccaacgacgagtctgccctacagaaagccgtcgctggccagcccgtgtccgtggcaatagacgccagcggcaacgacttccagttctactcagagggcgtcttcaccggagaatgcagcacggatctcgaccacggcgtcgccgccgtcgggtacggcactaccagggatggcaccaagtactggatcgtcaagaactcgtggggagaggactggggcgagaagggctacatcaggatgcagcgcggggtgtcgcagccagaggggcagtgtggcatcgccatgcaggcgtcctacccaactaagtcggcaccacatgccaggacggtcagggaagggtctcatagtgatgagctctagatggcatgcacacatatgatcattcggagtgcaagctctgcgttgaggagaactgaatctcccactgttgtgttatttactttatgcaagatgttaccacaaatgtaataaacgtaagcaaggacattatagcaaagaattgcaactaatttgtcaaatcaaatggattaagtgcaattcaagac

SEQ ID NO: 4412 - DNA, 652 bp, Triticum aestivum
  N_region (102)..(102): n = any nucleotide
caccttgtgagctgcgtcactgccaggctctttgtgcgattgggaaagcgaaatgctcccgtccaaggacaccaggcagctcctgctggatgtgtgctgcgncctctcatggatgactacaactggctgcagcatgttgcaggtcgtttgaccggtctgtcgttgaggaagggatcgggtcgacgatcctgacgctgccgctggaggatcagcagacgatactgctctcatggctcgggagcttcctgaaggttggtaacagctgccccaacctgcagaaggcctttgaggtgtggtggaggaggacctttgtgcggccttacgtcgaacagcaggggagccgttcgcagtcgggtcggagctgagatctccggcggcttgcgcagggaagctaccgcgcgccgtttcgtaagtagaacatcgctgaaaatggtttagtggtataagttgatttgtgtgaggcttgaaatatgtttgtgcgctgtgctagtgatgcttcttcggttcttcgctgatacgtgaagctctctgaattctggcttacagaatgtcttgtctgatgtggtgctcacttaccacgagacatcagtttgttgcattgtgttttgttactacgacttgtgcggtattattgcggctcacatgtagaaac

SEQ ID NO: 4413 - DNA, 697 bp, Triticum aestivum
ctaccgaccaattcgcgccaccttgtgagctgcgtcactgccaggctctttgtggcgattgggaaaggcgaatgctcccgtccaaggacaccaggcagctcctcctggatgtctggctgcagcctctcatggatgactacaactggctgcagcacggttgcaggtcgttcgaccggaccgtcgtcgaggaagggatcgggtcgaccatcctgacgctgccgctggaggatcagcagacgatactgctctcgtggctcgggagcttcctcaaggttgggaacagctgccccaacctgcagaaggcctttgaggtgtggtggaggaggacctttgtgcggccttacgtcgaacagcaggggagccggtcgcagtcgtgtcggagttgagatctccggtggcttgcgcagtgaagctatcgcgcgccgtttcgtaagtagaacatcgctgaaaaagggtttagtcgtataagttgatttgtgtgaggcttgagaatatgtttgtgcgctgtgctttgtggtgcttcttcgggtcttcgctgatacgtcaagttctctgaattctggcttaccgaatgtcttgtctgatgtgctgcttatttaccaacgagacatcagtttgttgacaattgcgatatgataccacagacaattgatgacggataagatggtgacactgtaaaaatgcggctcaccagata

SEQ ID NO: 4414 - DNA, 657 bp, Triticum aestivum
ggacaccagcagctcctcctggatgtctgtctgcagcctctcatggatgactacaactggctgcagcacggttgcaggtcgttcgaccggaccgtcgtcgaggaagggatcgggtcgacgatcctgacgctgccgctggaggatcagcagacgatactgctctcgtggctcgggagtttcctcaaggtcggtaacagctgccccaacctgcagaaggcctttgaggtgtggtggaggaggacctttgtgcggccttacgtcgaacagcagggaagccggtcgcagtcgggtcggagctgagatctccggtggcggcttgcgcagggaggctatcgcgggcgccgattcgtaagtagaacatcgctgaagaagatttagtctataagttgatttgtgtgaggctttgagatatgtttgtgcgctgtgctttgtgatgcttcttcggttcttcgctgacacgtgaagttccctgaattctggcctaccgaatgtcttgtctgatgtgctgcttacttaccacgggacatcagtttgttgcattgtgttttgttactacgacattgtgcggtattggtgacactgtattattgcggctcacatgtagaaactgaatgcttgtgatgcaactgtaaatattttgctgggatgtaggaatac

SEQ ID NO: 4415 - DNA, 455 bp, Triticum aestivum
  N_region (146)..(146): n = any nucleotide
  N_region (249)..(249): n = any nucleotide
ttccccccagactacccattcaaaccaccgaaggttgcatttaaaacaaaggttttccacccaaatatcaatgggagcatctgccttgatatcttgaaggaacaatggagccctgcattgacagtttcaaaggtgctcctttcaanctgctctctactaacagacccgaaccccgacgacccgttggttccggagattgcacacatgtacaagagtgatcgtgcgaagtatgagtccacagcgaggagntggacccagaagtatgcaatgggctgaccttgtgagcctaggtggaggatgatgttggagccatcttcgcttgttacacctaatgtatctttgttcctgttctgctgctgctatatgggattgtactgtccacctacctgactgaattcaagtgtcatattgtgaagtgatggcagaaggcctctatgggtctatggtgcacccaa

SEQ ID NO: 4416 - DNA, 583 bp, Triticum aestivum
tacttccatgtgtgaaaggtgactaggagaggtttcatgttatttttctgttccatgctagcacatgtagataaaatatttgtgctatagcatgatctaagtagttgcaactgctttgccaatgtctttcaacatttcaggtaaatctgaaatgcttgtcttgagctccgcatttcctctagctaaattatgatggaaacaattttccagtttgcatttaaaacaaaggttttccacccaaatatcaacagcaatgggagcatctgtcttgatatcttgaaggagcaatggagccctgcattgacagtttcaaaggtgctcctttcaatctgctctctactaacggacccaaaccctgacgacccgttggttccggagattgcacacatgtacaagagcgaccgtgcaaagtatgagtccacagcgaggagctggacccagaagtatgcaatgggctgaccctggtagccgcgggtggaggatgatgttggagccatcttcgcttgtaacacctaatgtatctttgttcctgttctgctgctgctatatgggattgtactgtccacctgactgaattcaagtg

SEQ ID NO: 4417 - DNA, 729 bp, Triticum aestivum
tccctctcgattccgatcggaatcgcaactagctccgccgcttgattagccggcagccccgtccccatggcgtccaagcggatcctcaaggagctcaaggacctgcagagggatccccccacctcctgcagcgccggccctgtggcggaagatatgttccactggcaagcgacgatcatgggtccatcggaaagcccatatgctggtggtgtatttttggttactattcacttccccccagactacccattcaagccacccaaggttgcatttaaaacaaaggttttccacccaaatatcaacagcaatgggagcatctgtcttgatatcttgaaggagcaatggagccctgcattgacagtttcaaaggtgctcctttcaatctgctctctactaacggacccaaaccccgacgacccgttggttccggagattgcacacatgtacaagagcgaccgtgcgaagtatgagtccacagcgaggagctggacccagaagtatgcaatgggctgaccctggagccgcgcttggaggatgatgttggggccatcttcgcttgttacacctaatgtatctttgttcctgttctgctgctgctatatgggattgtactgtccacctacctgactgaattcaagtgtcatattgtgaagtgatggcagaaggcctctatgggtctatgggtgcacccatccaacaaattaatagagatgggaaccgaaactaaag

SEQ ID NO: 4418 - DNA, 735 bp, Triticum aestivum
ccgatcgaatcgcaactagccccgccgctgattagccggcagccggccccgtccccatggcgtccaagcggatcctcaaggagctcaaggacctgcagagggatccccccacctcctgcagcgccggccctgtggcggaagatatgttccactggcaggcgacaatcatgggtccatcggaaagcccatatgctggtggtgtatttttggttactattcacttccccccagactacccattcaagccacccaaggttgcatttaaaacaaaggttttccacccaaatatcaacagcaatgggagcatctgtcttgatatcttgaaggagcaatggagccctgcattgacagtttcaaaggtgctcctttcaatctgctctctactaacggacccaaaccctgacgacccgttggttccggagattgcacacatgtacaagagcgaccgtgcaaagtatgagtccacagcgaggagctggacccagaagtatgcaatgggctgaccctggtagccgcgggtggaggatgatgttggagccatcttcgcttgtaacacctaatgtatctttgttcctgttctgctgctgctatatgggattgtactgtccacctgactgaattcaagtgtcatattgtgaagtgatggcaaaaggcctctaatgggtctatgggtgcacccattcaacaaattaatagagatgggaactgaaactaaagttgttccgttgcttgaaa

SEQ ID NO: 4419 - DNA, 750 bp, Triticum aestivum
cctccctcctcttcgattttcgattggaatcggagccagctccgctgcctgattagccggccggccccggccccgtctccgtccccatggcgtccaagcggatcctcaaggagctcaaggacctgcagagggatccccccacctcctgcagcgccggccctgtggcagaagatatgttccactggcaagcaacgatcatgggcccatcggaaagcccatatgctggtggtgtatttttggttactattcacttccccccagactacccattcaaaccaccgaaggttgcatttaaaacaaaggttttccacccaaatatcaacagcaatgggagcatctgccttgatatcttgaaggaacaatggagccctgcattgacagtttcaaaggtgctcctttcaatctgctctctactaacagacccgaaccccgacgacccgttggttccggagattgcacacatgtacaagagtgatcgtgcgaagtatgagtccacagcgaggagctggacccagaagtatgcaatgggctgaccttgtgagcctaggtggaggatgatgttggagccatcttcgcttgttacacctaatgtatctttgttcctgttctgctgctgctatatgggattgtactgtccacctacctgactgaattcaagtgtcatattgtgaagtgatggcagaaggcctctatgggtctatgggtgcacccatccaacaaattaatagagatggaactgaaactaaattg

SEQ ID NO: 4420 - DNA, 902 bp, Triticum aestivum
gtgcaggtagatgatcaagtaactgttacccggtggtccaagcgacatgtaacacgaggctctgataagcgatcaacaaatattgttgaatggaggaagaagactacagaggcccgggctccatcttttgatgaaaaagaaagagaaagatgcatatcaaagtgcaagagagaggaagcaaagatcactgcttgggacaatctgcagaaagcaaaagcagaggcagcaattcggaagttggagatgaagcttgaaaagaagaggtcatcatcgatggatagaattttgggcaaactacgttctgctcaaaagaaagcacaaggcatgcgcactacagtttctgtcagtgaggatcagtgtgctgtcagtgaagatcagtgtgctgtgagggcaaccaagaaggcatccttgagaaggactagcaagcctttcagctgctgtttcacctatcatgcttgctagttgtgatatggttggtatctacaatgattgtagaaactttttttgaacctttgcagctcaagtcagccggcagacaaactgaagttagactgcaaatgtccgccgttgcagctggagatagcaggagtaattagaagaagagagcttagcgcggtctgatgaatcaaagttttggagcaaagcccactcttgtagctgatgatatggagtacttcactcggtactctgtatctgtaaaccaagcaagtgctgtagatcaggaagctcccttctcgagcttttctctagttgaactccggactgatgggccggtcctcatgggctgcctgatgctgtgtactgtatctttgccatggaattctgtatgtagtttcaagcattggggctccagtgtcaaatattggattcattgaacaaagttgtgagagccacaagctaga

SEQ ID NO: 4421 - DNA, 777 bp, Triticum aestivum
ccgggctccatcttttgatgaaaaagaaagagaaagatgcatatcaaagtgcaagagagaggaagcaaagatcactgcttgggaaaatctgcagaaagcaaaagcagaggcagcaatccggaagttggagatgaagcttgaaaagaagaggtcatcatcgatggacagaattttgggcaaactacgttctgctcaaaagaaagcacaaggcatgcgcactacagtttctgtcagcgaggatcagtgtgctgtcagtgaagatcagtgtgctgtgagggcaaccaagaaggcatccttgagaaggactggcaagcctttcagctgctgtttcacctaccatgcttgctagttctgatatggttggtatctacattgattgtagaaactttttgaacctttgcagctcaagtcagccgacagacaaaccgaagctggactgcaaatgtccgccgttgcagctggaggtagcaggagtagatagaagaagagagctttgcgcagtctgaagaatggaacactcaactggggtgtcagaaaatcgaagttttcgagcaaagcccactcttgtagccggtgatatgatatggagtacttgactcggtgctctgtatctgtaaaccaagcaagtgctgtaggtcaggaagctcccctctcgagcttctctctagttgaactccggactgatcggcctgatgatgtgtaatgtatctttcccgtggaattctgtatgtagtttcaagcattggggctccagtgtcaaatattggactcattaaa

SEQ ID NO: 4422 - DNA, 647 bp, Triticum aestivum
taagggatcctgaagtcatgacatcatacagggaactgtcaaagaaagcacagaaagcttactacatctggtggagactgagcggattgcttggtgacaagaatcgtccgttgatgtacatactgcttcaggcactgttcacagtggcgacattggctttcactgtacccatattcctttcataccgactgcatgggatcttccaagtactaaaggtgtgtgctgcaacatggaacggtggaagcttcatcctggaggtgatgcccagacaagttgtccagaaggagaagaagagacttgagatgaagcccattgaacaggcaaacttgaaggagcacatggatgatccttcaggtaaccaccagcatgcatccgaagagccaagtcagtgaggaaactgatttggggcgcaagattagattttctggttactggtactatcgtgtgaccttgttccttctgtaagaaaagttgctatcgatgaatgttctgttggcttgggacatttcagggctgtttatggtgggatcgctagttagggtgtgtgggcatgtttgacatagcaaagggtggtggttcaaatgctatcagcgcattttatgccaactttgtctctagggttttcaatgtgtgatgagtgtgctgag

SEQ ID NO: 4423 - DNA, 802 bp, Triticum aestivum
tgtgaaccctgccgtcaccttcggcctcgccctcggcggccagatcaccatcctcaccggcatcttctactgggttgccccagctcctcgggcgccatcgtcggcgcctttcctcgtccagttctgcaccggcgtggcgacccctacacacgggctttccggcgtgggcgccttcgagggcgtcgtgatggagatcatcgtcaccttcgggctcgtctacaccgtgtacgccaccgccgccgaccccaagaaggggtccctcggcaccatcgctccaatcgccatcggcttcatcgtcggcgccaacatcctcgtcgccggccccttctccggcgggtccatgaaccctgcacgctccttcggccccgccgttgccagcggcgacttcaccaacatctggatctactgggccggcccgctcatcggcggtggcctcgccggcgtcgtctaccggtacctgtacatgtgcgacgaccacaccgccgtcgccggcaacgactactaagccagccatgggaagatcattcggtctttggtttccataatgtcttcggcaacataagaagtgcgtacgtggtggtcactctcaggattgtctggatgatgtgaggaacgtcatgttgtttggttccgatcgaaagcccgcgaggctgtggcacttggatgatgcatgtttctgtatctgtactgtgatggatgttgtgaagttgttggggtttcaagattcttcagttgagtttccttatgcgattcaataagagcatcattgtttagtgcattcccatgcccactggccaaactt

SEQ ID NO: 4424 - DNA, 613 bp, Triticum aestivum
aacgacgacactaatacggactgtttcctttctcaggccacccctacacacgggctttccggcgtggcgcctttgagggcgtcgtgatggagatcatcgtcaccttcgggctcgtctacaccgtgtacgccaccgccgccgaccccaagaagggatccctcggcaccatcgcccccatcgccatcggcttcatcgtcggcgccaacatcctcgtggccggccccttctccggcgggtccatgaaccctgcacgctccttcggccccgccgttgccagcggcgacttcaccaacatctgggtctactgggccggcccgctcatcggcggtggcctcgccggcgtcgtctaccgatacctatacatgtgcgacgaccacagccccgtcgccggcaacgactactaagccagccatgggaagagtcgttcggtccataatgccttcggcaacataaaaagtgcgtacgtggtgggcagtctcacgaatgtctcgatgatgtgaagaacatcctgttgtttggttcagatcgaagctgtagctggatgatgcatgttcctttatctgtaaaatgtgatgttgtgaagttggttgggtttgagaattcttcagttgag

SEQ ID NO: 4425 - DNA, 730 bp, Triticum aestivum
cgtcaccttcggcttcgccctcggcggccagatcaccatcctcaccggcatcttctattgggttgcccagctcctcggtgccatcgtcggcgccttcctcgtccagttctgcaccggcgtggcgacccctacacacgggctttccggcgtgggcgcctttgagggcgtcgtgatggagatcatcgtcaccttcgggctcgtctacaccgtgtacgccaccgccgccgaccccaagaagggttccctcggcaccatcgcccccatcgccatcggcttcatcgtcggcgccaacatcctcgttgccggccccttctccggcgggtccatgaaccctgcacgctccttcggccccgccgttgccagcggcgacttcaccaacatctggatctactgggccggcccgctcatcggcggtggcctcgccggcgtcgtctaccggtacgtgtacatgtgcgacgaccacagctccgtcgccggcaacgactactaagccagccatgggaagagtcgtcgggtccataatgccttcggcaacataaaagtgcgtacgtggtgggcagtctcacgaatgtctcgatgatgtgaagaacatcctgttgtttggttcagatcgaagctgtagcacctggatgatgcatgttcctttatctgtaaaatgtgatgttgtgaagttggtggggtttgagaattcttcagttgagtttccttatgcgattcaataagaacatca

SEQ ID NO: 4426 - DNA, 705 bp, Triticum aestivum
  N_region (22)..(22): n = any nucleotide
tgttttcagtagtggccagtgnaaaggcagcgggttgcatggttactacagggaaagttgtggaaggctgcaatgttcgggttcttcgtaaaggaaaagaagtttatgtgggtacacttgattccttgagacgggtgaaagaaactgtgaaggaggttggtgcggggctagaatgtggtattggggtagatgacttcgacgattgggaggaaggtgacgtccttgaggcattcaacaccgtgaaaaaggctagaacgctcgaggaagcctctgcgactgtgactgctgctctcaagggtgcaggcgtccaggtgtagatgttgcaaagctgataagcgagtaacaactgcagcagccattttttctttcggcgtcgcagctggagtgcgttggccacattccctaagaatgacactcaggtagttgaaagacagaacctatacatgacacatgaagtgcttgcgttgctgccgggagcctgcctgtgctggaccgtattgtatcccgcctctcaaagctgcatgtgctactgtatgttgatgtacatagagaagattacatctgctgtttttagtttgcctctaacaggtagataaagggggggtggggtgtttctagttttataccttttgtcttcttgagacaagctgtaacctgcaacgttgaggccgcatcattttccgatcatcattcgtcatcgtctac

SEQ ID NO: 4427 - DNA, 623 bp, Triticum aestivum
gaagctgctctcctacattgagcagcaggccacggctgctggcgctcgctgccggccaaggccgggctgcagcggtgcggcaagagctgccggctccggtggaccaactacctccggccggacatcaagaggggcaagttcagcctgcaggaggagcagaccatcatccagctccatgcgcttctcggcaacaggtggtcagcgatcgcgacgcacctgcccaagcgtaccgacaacgagatcaagaactactggaacacgcacctcaagaagcggctggccaagatgggcatcgacccggtcacgcacaagccgcgctccgacgtgcccggcggcgcgggcggcgccgccgagggggcggccggcgcgcagcacgccaaggccgcggcgcacctcagccacacggcgcagtgggagagcgcgcggctcgaggccgaggcgcgcctggcgcgggaggccaagctgcgggcgctcgccacgtccgcctcctcctcggcgcagtaccttgtcggcggcccacgccgccgcgcccgggctcgactcgcccacgtccacgctcagctttgcggacagcgcggcgctcgcgttcggtgctggaggcgcccagtgccgggggcgctcta

SEQ ID NO: 4428 - DNA, 681 bp, Triticum aestivum
  N_region (487)..(502): n = any nucleotide
acgggtgatgttctggcgcgcatgagggcgatctcccgctcgacgtccggcgggtagagcgactgcccggcgcgctgccggcgcttgaggcgcgtgttccagaagttcttgacctcgttgtccgtcctccccggcaggtgtgttgagatgcgcgcccacttgttgccgatgaggccgtggaggcggaggatgaggcgctcctcctcgggggagaaggggcccttgcggaggttggggcggaggtggttggcccaccggagccggcagctcttgccgcagcgctgcagcccggtctcccggcgcaccgcgttccagttgccctcgccgtgccgccgcacgtggtcgagcagcacccggtcctccgcctgcgtccacggccccttcttcagcccaccgccgccgccgccttcccccaccccgctcctcggcaccgtcgtgtccatcgccgtcgccatgtcagcagatcgtcttcgtctccccgcaccannnnnnnnnnnnnnnngtgctcgcgccgcgaggtgtcgtcggtccttctggtcttctctcctcccctcccggcccggacgtccaagagagaggggggagagagaactgcacgcgatgtcggtgtcggcgccggcttacctccagcgcatggcccggcgggccggatgaacgagcaggtcgagagctggaacgaat

SEQ ID NO: 4429 - DNA, 597 bp, Triticum aestivum
cagtcacttgtttatggtacaattttctacagcctgggttcgtttgagtggacagcagtgaagttcttgtggttcctgttcttcatgtacttcactctgttgtacttcaccttttatggcatgatgacaacggcgatcacaccaaaccatatggtcgcgcctatcattgccgccccattctacacgctatggaatctcttctgcgggttcatgatcccaagaaagctgatcccagtgtggtggaggtggtactactgggccaacccggtgtcctggacgctgtacgggctcctgacctcccagttcggcgacctggaccagcccctgctgctggccgacggcatcagaaccaccaccgtcgtggcgttcctggaggagcactttgggttccggcacgacttcctcggcgtagtcgccacgatggtgatcggcttctgcgtcctcttcgccgtcgtcttcgccctcgccatcaggaacctcaacttccagcgcagatgatcggcagcagcaaatgtaccccgcgcagtttaacttaattacccagcatgcatgtgttcaatcaattaagagctcgtaaataatttcgagagagacatc

SEQ ID NO: 4430 - DNA, 597 bp, Triticum aestivum
tgatgaagagaaagaaaagtggatgaattggactacttaactggaattccagtggcaagtgacattttgctatacgcagtacctgtatgtgcaccttataacgcgctacagacatacaaatatcgtgtaaagatcaccccaggcactgcaaagaaaggaaaagccgccaaaactgctatgagcttattcatgcacattcctgatgccacgaaccgcgagaaggaactaatgaaggcatgcactgatcctgaattggttgctgcgattgttggaaatgccaaaatcaccgcacctggcctcactcaactgaagcagaagcagaagcagaaagggaaaaaggctgcgaaaagtaactagattgaaaccaccatgacaatgcactgacgttttgatccactgctgtctgcagaacgcatgtaaatcctgtggtatgatctgtctgcactctgtagaaatcatgtaaatcacgtgatgtgatcagttgaggcagcaaatagtacactttagtgtatgtaaagtattctacacctctggcatttgagaggccaggggccagtgcaacagagacggcggcctaaaagagcaaatatacactct

SEQ ID NO: 4431 - DNA, 598 bp, Triticum aestivum
aggagatgttcaagaccatggacacggacggcagcggtgccatcacgttcgaggagctcagggaggggctacgccgttacgggtccaccgagctcagggactcagaggtgcgggacctgatggaggccgccgacgtggaccgcagcggcaccatcgattacgacgagttcatcgccgcgaccgtgcacatgaacaagctggaccgtgaggagcacctcatggcggccttctcctacttcgacaaggacggcagcgggtacatcaccgtcgatgagctggaggtggcgtgtcgcgagcacaacatggccgacgtcggcatcgacgacatcatcagggaggtcgaccaggacaacgatggtcggatcgactacggggagttcgtggccatgatgaagaaggggatcatcggcaatggcaggcttaccatgaggcacacctccgacggcagcatcctccatggagcaggcagcggcctcagcagctagccagctaacaagcatagctccaccagccatccattgatcaatcgatcgccatggttgtgccaactacattgtatttgaatttaatagaagatgagcaagaatacgacgcgggt

SEQ ID NO: 4432 - DNA, 976 bp, Triticum aestivum
gattgtaatctacgatcagtgctgacaattgcctttcaattcccttacgagatgcatctccaagatagtgttgcaactatggcccggcagtatgtccgcagcattgtctccgccgttcagagagtgtcgatggctatctctccctctcgatctggcttgaatgctgaacataagataatttctggcttccctgaagctgcaacactagctcgctggatatgccaaagttaccggttccatctgggggtcgagttatttagacaggcagatgaagctggggaatctttattgagaatgctttgggatcatgaagatgctattttgtgctgttctttcaaggaaaagcctgtatttacgtttgcaaacgagatgggaattaacatgttggaaacatctttcgttgcccttcaagatctctcgttggacaagatatttgatgaagctggtagaaaggcactatactccgagatcccaaagttgatggagcagggctttgtttacctgccaggtggtgtgtgcttgtctgggatgggccgccatgtctcatttgagaatgctgtagcatggaaagtagttggtgaggacaacaacgtgcactgcctcgccttctgcttcgtcaactggtctttcgtgtgatcatccatcacctgtccccgtcgcatgcagctccatttttgctctctgtaggagagaaccgccgccactggaaagtagttttacgctatctttaactagtttgtttctagatttgaagagccagcatcgggaagaattctgcctcgtgtaaaatctgctcacgtttccactaatttacccaggcaagaagctggctgatgtctgtctggattgaggtgctagcctttcttgaatctagaaaggttcctacttttattcgtgtgatgatgatggaatgctagtagtagcgaaattgggacacagctgatgtataatcagtgtttgtgtgcctttttcgctt

SEQ ID NO: 4433 - DNA, 1054 bp, Triticum aestivum
gcttttggtttacgagtatatgccgctaggttctttggaagaccaccttgcacgatccttccccagataaaccccgccttgactggaatacacggatgaagatagctgccggtgcagctaaagggctggagcatttgcatgacaaaacaaatcctcctgtcatataccgggacttgaaatgttcaaacatcttgctcggagagggataccacccaaaactgtctgactttggattggcaaagcttggcccagttggcgataagacacacgtttccaccagagtgatgggtacatacgggtattgtgcgcctgagtatgctatgaccggtcagctgactctgaagtcggatgtttacagctatggtgttgttctattggagatcatcacagggcgaagggctatcgacaacactcgagctgcgggggagcaaaaccttgttgcatgggcccgtcccttgttcaaggacaggaggaagttcccccaaatggcagacccggcgctggagggccggtacccggcaaggggactgtaccaggccctggccgtcgccgcaatgtgcgtgcaagaacagccaaccctgaggccgttgatcggcgacgtcgtcacagccctgagctaccttgcctcccagccctacgatccggaggtgcacggcgtccaccgcccgtcgcgcctgacggcttccggcacgccgccccgagcccggaaccacggtgccgatcatcaaagaggaggaagcgagtgaggcggtgcggcttccggagagccctgaattttgtcgcggtacgagtccaaaatggagctgaagaggaattttgtggatagcgaggcggcttttgcgtttacatgttgggggggaattgtgaatcggtgatgtatgttgatcggttggtctatctggttgagatggtgccagagatgatgcatgcatgtgctctccggttagagtatgtatctaggtagatgacgaggcagtcggtgtaaccacccatgactttacagttcgatcagtctatggactaccatttctccttgtatttgacagaactgcta

SEQ ID NO: 4434 - DNA, 1057 bp, Triticum aestivum
gagacgtgactgcaaccttggttcctgtccgcacccagctgccacaggcttgtctgcaccggtacgctctctcgctggtacgcgatttgaggcataggagcgaggggcacgttgcaaggtcgtcttcggtcacggctacaacttatgacgagaaggggatatatgcttagtaggctgccctgtggttagcaagtcattgtcgcagtctccgcctcccaggttgcctcggcttgctgttggtgtgtgttgctgcaacagccccttccggccacctctgaggttgggcaatgtggccactgatgtcaagggcgtcgccatcttacttgcaaggcacaaattgcaccgcacgcaacatcttgctatgcatggccactgatgccaaagagaaccaagtgccttgacgtactatataaagagatcatgtgaaaacaaagctgaagttcttgatcaggatgagaaggaaagtggtcttcgagcaacactaatcctgggtcatacatttggtcatgctatagaaacagggcttggctatggagaatggctccatggggaagctgttgctgctggaacggttatggcagctgacatgtcttaccgcctgggctggatagacgagtccatcaagaaacggacatttgacatactagatcaagccaagcttcccgtgacaccaccaaagggcatgacggtggagaagttcaagaacatcatggctgtcgacaagaaggtcgcggacggattgctgaggctcatccttctgaaaggacctctgggaggctgcgttttcaccggcgagtacgacaggaaagccctagacgaaaccctccgcgcgttctgcgacaattgatcctgtatactagtaggctgtaatgtcatatcagacagagagagtgagtgcatcgtatgctacctttattttttcatttcgttttggcgagaataatagaatgcggtgaggggttggttccaggtcgtagtagcaattcattgtagggcatcatacctcagtaattgtgaattgtggtctagtcattttgaaaaaccaaaaatcacccaa

SEQ ID NO: 4435 - DNA, 628 bp, Triticum aestivum
atgagaaagaaagtgtcttcgagcaacactaaacctgggtcatacatttggtcatgctatagaaacagggcttggctatggagaatggctccatggggaagccgttgctgctggaacggttatggcagctgacatgtcttaccgcctgggctggatagacgagtccatcaagaaacggacatttgacatactagatcaagccaagcttcccgtgacaccaccaaagggcatgacggtggagaagttcaaaaacatcatggctgtcgacaagaaggtcgcggacggattgctgaggctcatccttctgaaaggacctctgggaggctgcgttttcaccggtgagtacgacaggaaagcactggacgaaaccctccgtgcgttctgcgacaactgatcgttgtcaagctggagacccagcacttctgtatactagtaggctgtaatatcataccagacagagagagtgagagtgcattgtgtgctacctttattttttcatttcgttttggcgagaataatggaatgcggtaaggggttggttccaggtcgcggtattagaaattcattgtagggcatcatgcctcagtaattgtgaattgtgatcactcattttgaataacagaattca

SEQ ID NO: 4436 - DNA, 504 bp, Triticum aestivum
gacctacgctataaagagatcatgtgaaaacaaagctgaagtttttgctcaggatgagaaggaaatggtcttcgagcacactaaacctgggtcatacatttggtcatgctatagaaacagggcttggctatggagaatggctccacggggaggctgttgctgctggaacggttatggcagctgacatgtcttaccgcctgggctggatagacgagtccatcaagaaacggacatttgacatactagatcaagccaagcttcccgtgacatcaccaaagggcatgacggtagagaagttcagaaacatcatggcggtcgacaagaaggtcgcggacggattgttgaggctcatccttctgaaaggacctctgggaggctgcgttttcaccggcgagtacgacaggaaagccctggacgaaaccctccgcgctttctgcgacaactgatcgttgtcaagctggagctccagcatttctgtatactagtaggctgtaatatcatatc

SEQ ID NO: 4437 - DNA, 716 bp, Triticum aestivum
  N_region (617)..(617): n = any nucleotide
  N_region (693)..(693): n = any nucleotide
  N_region (697)..(697): n = any nucleotide
cactcccccagatggagtcaagaaggccatggagatgcaggccgcagcagagcgcaagaaacgtgctcagatcctcgagtctgataggtgctatgatggaaaatgcaaacaaagcaaagggtgaagctgaagcgattcttgccaggtcgcaagccactgctgaagggatcaggatggtctcggagtcgtttaaaactgaaggcagcacagaggctgccagcttgaggattgctgaacagtacatcagagcattcagtgaactggctagaagtacgaacacgatgcttcttcccagcgacgcaggcaatccggggacaatgattgctcaggcgctccagatatacaaccacacgtacaagcagaaactgacgctgggaagccccggccccagcaagcgggcagaagaggctgatttgtcccttgggatgccatccgtgagcgacctcggcacctttgagcaccacaagtagagtattgactattgagtggggaatcttctctttttttctttttctcttctgttagggaggagaggaatgaatagctagactggatagatagattgctagggaggcagcgcaactttgtcacgagtgaagatttactgattaggtcgntcggtcggttggataaaacacaatactctgttcctgttggttaggagcagctttgagagaaagctttttatctgtntatntgaattgagtggtgaacct

SEQ ID NO: 4438 - DNA, 1058 bp, Triticum aestivum
cttctccatggcaagaagggcgaacacctgcactgggacactcggtacaagattgcaattgaagctgccaaggggctgtgctacctgcaccatgattgttcaccgctgatacttcaccgtgatgtcaagtcaaacaatatacttcttgactctgactttgaagctcatgtggccgacttcgggctggcgaaattcctgcaggacaccggcgcatcagaatgcatgtccgccattgctggttcatatggctacattgctccagaatatgcatacaccctcaaggtcgatgagaagagcgacgtctacagcttcggcgtggtgcttctggagctcgtcaccgggcgtaaacctgtgggggagtttggcgacggcgtcgacattgtccagtgggtcaagatgatgacaggcccaaacaaggagcaagtgatgaagatcctggacccgaggctgtcgaccgtgccggtgcacgaggtcatgcacgtattctacgtccctgctgtgcaccgaggagcacagcgtgcagcgcccgacgatgcgggaggtcgtgcagatcctgagcgagctcccaaagccagctgccaaccaagatggagaagaagagcttcctctctcctgcgaaggacctgaatccaaccctcttgccccaaccagttacaccgaggcaccagccggcgacgcgaaagatcagcagccgcagaagcagcacacaagctcggagtcgtcgcctcctcctgatctcatcagcatctgatcatccaagtacccggaagcatcgccgtccgtcgcaaatatgttggggcttcctttgatcgtgcaagcttaggcctgaatctggggttcgttgggtgagagactttgttggtgttgtgctgtacatatccaagctgctttggtggtgggggtgtccaagagcttccagtttggtgtgtgtttgcctgtttggtactttgctttgctgcttgtagccgtagggattatgtggtagtggagcctttgatgatctttccttgtgcaatgtagtagtagtatctagtagataagccatctagctaagttca

SEQ ID NO: 4439 - DNA, 961 bp, Triticum aestivum
  N_region (743)..(765): n = any nucleotide
cgttgagcgccgccgcgcgtgctcctccctgcccggacccctcctgcaacccgcatcgcctccagtgcctggcgcgacctcttcttcgaacgccaccgctcggcctgcttctgtcgacgccgccgcccgggtcttcctccagaccgccgcaccccagtgccccgcgggacctcctcctcgaacgccgccgccgcgcctgcgacgccacagctgctgacaccatcgcgggttctccctcgcgcccatatttccccgcccactctccgcgggcgccgcgacctctcttccagctcggtttcccgaactccacccaaccatggccccagaaaggagtgggtctaagaagcaggagctcaactctcagaaaaagctagagaagaagctcagcttctatacaaaagtgaaagatgcggttacctccctacaggccaaaaaggctatcagtaagaaaaagaaacagaggagccgtcagaagaaactgaaagcatatgatctgtcagcactttctgagttccttccacaaacagccagctcccagcagcagacggaagtaaagcttaaccgcaaatcgaagcaggctttagtgcagcgagagtctgctcaactgaatgctgtactgaacaatgctcagttccagctagacccattggctgcaattcatcagcatctggtatcaacacaaccgccttcttccgtgaaagacgacgaatctgcaaagaacgcgaagatatctaggaaggacnnnnnnnnnnnnnnnnnnnnnnnaaatgctttgtcgacccctcagtcgatggatatctgatactgcgaactaactgtctaaagtaatgaacgcagctacttttcttatcttggtctgtaggtgacccttgtcatctgtgaacttggaagttgtaaaattttgctaccagtgtgagttttgtgtgtctgaacttccagcttgcttttttctcgaaagaaa

SEQ ID NO: 4440 - DNA, 436 bp, Triticum aestivum
caccatggcctcagaaaggattggttctaagaaagcaggagctcaactctaagaaaaagctagagaagaagctcagctttctatacaaaagtgaaagatgcggttacctccctacaggccaaaaaggctatcagtaagaaaaagaaacagaggagccgtcagaagaaactgaaactgaaagcatatgatttgtcagcactttctgagttccttccacaaacagctggctcgcagcagcagacggaagtaaagctcaaccgcaagtcaaagcaggctttagtgcaacgagagtctgctcaactgaatgctgtactgaacaaccctcagttccagctagacccattggctgcaattcatcagcatctggtatcaacacaaccgccttcttccgtgaaagacgatgagtctgcaaagagcgggaagaaatctaggaagg

SEQ ID NO: 4441 - DNA, 606 bp, Triticum aestivum
cacgccggcgcgccatgatggcccgtcgctacggcagcatgtctccatcgccagcgtggccggcgtgctcggcggcgtcggcccgcacgcatacaccgcctccaagcacgccatcgtggggctcaccaagaacgccgcctgcgagctcggcgcgcacggcatccgcgtcaactgcgtctcgcccttcggcgtcgccaccccaatgctcatcaacgcgtggcgccagggccacgacgcgtcagccgccgacgacgccgacgccgacatcggcctggaggtggccgtgccgagcgaccaggaggtggagaagatggaggaggtggtgaggagcctcgccacgctcaaggggtcgacgctgaggcccagggacatcgccgaggcggtgctcttcctggccagcgacgactcgagatacgtgtccggccacaacctcgtggtggacggcggcgtcaccacctcaagaaacttgatcgggctgtgaaaaatcacatgacccacctcgcatctagcatctacgtagatcagtaggaggaacaaagatgattgtttagtctgcaataactgtactcaagttctttggttggttcgttcggttaattagttgat

SEQ ID NO: 4442 - DNA, 698 bp, Triticum aestivum
catcaactgcgactgctcgagtatcttcccttgacaagagaatcggttctgagtgagaagatcagcgtcggtacttcagtcggtaaacgataaagtaaaggaaatggatcagaaatatctagtctccgagaagacaaggtcagcacttgcagctgctgaacagggcgtctccactgctggatctgccatcatgaaaaacaggtatgtccttactggagctgcatgggtaactggtgccttcagtaaggttgcgaataccgcaaacgacgtcggggcaaaggcgaaggagaaaatagccgctgagcaggagggcaagaccgtagcggccgggtatgcacaagctgacatgtcggacgctcatgaaaagcccagggatttggatggtgaaatcacaaagatacatgtctctgaaaaccctgaagatatccccatatctaccgctgcagttttccccattacagtagaggattccagcgatgcgtctccaccaccgcccgctgctcctaagaaaccggaacctgcgcagggattgatactatgatgatctggctgatgcatgaatgtaaatagacatgagatgggttgtttaattcaggctgtagcgttgtggttgctgtattgtgattcacctgtttgaaggttgaaatttattgggaccgaaagagtttggaatttgtagcagccattttaattaatca

SEQ ID NO: 4443 - DNA, 956 bp, Triticum aestivum
ccatgcttctgacgggtgccacgatagtcgatatggctgtcatcgtaacaccagccactgattatgagctaccagctgatgttttagctgctctagagcccaaagatgcaaagtcctctgctcttgagaaggcagaggacatcgttgggaccatgctggccaaggggttcattcttggtagggatgcgctcgacaaagcaaaagctttagacgagaagcatcagctcacatcaactgcgactgctcgagtatcttcctttgacaagagaatcggtctgagtgagaagatcagcgttggtacttcagttgtaaatgataaagtaaaggaaatggatcagaaatatctagtttccgagaagactaggtcagcacttgcagctgctgaacagggcgtctctactgctggatctgccatcatgaagaacaggtatgtccttactggagcagcatgggtaactggtgccttcagtaaggttgcaaataccgcgaatgatgtcggggcaaaggcgaaggagaaaatagcggctgagcaggagggcaagaccgtagcggccgggcatgcacaagctgacatgtcggacgctcgtgaaaagcccagggatttggatggtgaagtcacaaagatacatgtctctgaaaaccctgaagatatccccatatctaccgctgcagttttccccattacagtagatgattccagcgatgcgtctccaccaccgcctgctactgctcttcccaagaaaccggaacctgcgcagggattgatactatgatgatctggctgatacatgaatgtaaatagacatatgaggtgggttgtttaattcaggctgtagcgttgtggctgctgtattgtgattcacctgtttgaaggttgaaatttatcaggaccgaaagagtttgggatttgtagcagccattttaattgatcaaacaatattatcatgcacttgcgt

SEQ ID NO: 4444 - DNA, 672 bp, Triticum aestivum
aatgtcagcaccgcggtcctcgagataaaagctgcccatcgccagggaggcgcactggtggaccagaacgtcccggtcccgctgagcatcctgtggcaaatccctcagtacttcctggtcggcgcctcggaggtgttcaccttcatcggggcgctcgagttcttctacgaccagtcgccggacgccatgaggagcctctgcagcgcgctgcagctcatcaccaccgcgctcgggaactacctcagcgccttcatcctcaccatggtcgcctacttcacgacgaggggagggagacccgggtggatccccgacaacctgaacgaggggcgcctcgataacttcttctggctgctcgcggggctcagctttctcaacttcttggtgtacgtgctgtgcgccaacaggttcaagagcaagaaagcggcttgagcttttgattgatggtcagaaaagttggacggcgtcggagcaacttgcttgaaaggtctaaaagacttgggaggtgtcatcctgtacatgtatacttcgaaatctgtatatatgttcctcagtacattatccctctgtttaagcacgtgtttacttttttaacaagctgtaattctctctgtattagaatccagtgtgggtcatggatctcctttcatgtacatatattttattcacttgaag

SEQ ID NO: 4445 - DNA, 942 bp, Triticum aestivum
  N_region (69)..(69): n = any nucleotide
cgtgcacatgatgaaagggcatgtgggccatcccggtgaacctgccgttcacggcgttcagccggagcntcaaggccagcggcagagcccgtcgggtgctggcggagatcacgcgggagaagacggccagccggtgccagccggagcacagcagggcgccgcggagcaacgacctcataacctgcctgctcggcctgacggacaaccatggcgagcggttgctgagcgacgaggagatcgtggacaacgccatggtcgccctcatcgccggccacgacacgtcgtccatcctgatgaccttcatggtccgccacctcgccaacgatgacgccaccctcgccgccatggtccaagagcatgaagagatcgccaggagcaaaggcgacggagaggctctcgcctgggaagatctgacgaggatgaagttcacatggcgagtcgcgcaggagatcctccgcatcgtccctccactcttcggcaacttcagaagagcgctggaggacgtggagttcgacggctacctcatcccaaaaggatggcaggtgttctggacgtcgaacgtgacgcacatggacgcgagcatcttccacgagccggccaagttcgacccgtccaggttcgagaaccaggcagcgccgccgtgctccttcgtcgccttcggggccggcccgaggctatgccccgggatagacttctcccggatcgagacgctggtgacgatgcaccacctggtgaggcggttcagatggaagctctgctgcaaggagaacaccttcgtgagggaccccatgccgtcgccgctgcgtggcctgcccatccaactcgagcacagggcctcccctcctccaccgtgaccaagcttcttcacagcaatctcactgtcatcgtcgttcgcattgcattagaaaaagtagcttgctgctgctgctgcaagtgtattgg

SEQ ID NO: 4446 - DNA, 894 bp, Triticum aestivum
  N_region (636)..(680): n = any nucleotide
gattccttagagcagcacatgcttctcaaaaagctccttgtgcaactttgggctatctgggcaattatcttgcggagttgacattgaccgattacagtttcctgaaatttcacccttcagtggtggcagcctcggcggtgttccttgcaaaatggacactcgaccaatcagacctgccatggaactctactctcgagcattacacctcatacaaaagttcagatattcaaggatgcgtacgcgatctatgggagctgcagcaaggcaacaccagcggaagtccccccctcaatgctatacgtgagaaataccggcaggaaaagtttgaatgtgtagccaacatgctgtcgccggcgatgcctgggtcgctcttccatagacaagctaacggcaccagccccctgctgatcaacaactcgtagcagcgcagcgtcagccccctgctgatcaacaatttgattttttccgaagatcttgtagcatccccttcccaccaccctctccccctccgatctggctgtgttgttatttccccccgacctttttcgagtcgtgcagtcgtaggcgatggctcacataaatgttgattgagttcctgcgtaggctgctgatggatgcctagggctggtaattgtnnnnnnnnnnnnnnnnnnnnnnnnnnnnnnnnnnnnnnnnnnnnnataactgagtgagttccgcttgatttaacgtaggtttgcgggcgtttcccagagtttagtgagtgcaattgcagtgcagtgctcgctcttgagattaggagagcaactctagtgagtccaggatggttgatgtgatctgatgtgatgtaacctgttgttacaagaacattcattattgcttggtttgtaaatgaacataaatgtagcctgactg

SEQ ID NO: 4447 - DNA, 872 bp, Triticum aestivum
aaaacgtttctgaggagattccttagagcagcacatgcttctcaaaaagctccttgtgcaactttgggctatctgggcaattatctcgcggagttgactttgaccgattacagtttcctgaaatttcacccttcagtggtggcagcctcggcagtgttccttgcaagatggacactcgaccaatcagacctgccatggaactgtactctcgagcattacacctcatacaaaagttctgatattcaaggatgcgtacgcgatctatgggagctgcagcagggcaacaccagcggaagtccccccctcaatgccatacgcgagaagtaccggcaggaaaagtttgaatgtgtagccaatatgctgtcgccggcgatgcctgtgtcgctcttccatagacaatctaacggcaccagccccctgctgatcaacaactcctagcagcgcagcgtcagccccctgctgatcaacaacctgatatttttcgaagatcttgtagcatccccttcccatcatcctctccccctccgatctggttgtgttgttatttccccccgacctttttcgagtcgtgcagtcgtaggcgatggctcacataaatgttgattgagttcctgtgtgggctgctgatggatgcctagggctggtaattgtatgatgatgatgatcctgtctgtctgtgtctgtatgataactgagtgagttccgcttgatttagcgtaggtttgagggcgtttcccagagtttagtgagtgcaattgcagtgcagtgctcgctcttgagattaggagagcaactgtagtgagtccaggatggttgatgtgatgtgatgtaacctgttgttacaagaacattcgttattgcttggtttgtaa

SEQ ID NO: 4448 - DNA, 532 bp, Triticum aestivum
ggtcttcaccgccgtcttacggggccttctacgtctccctcgaccgccgctccggcgcgctcgccgccctgctctgcctcctctgctgggccgccagctccgccctggccgcccgactcggcttctctgtcggatggaaggtggtattggtagctcagctgttctgttggactatgcaattcattggccatggagtttttgagaagcgggcacctgctctaattgacaatcttgtccaggctttgatgatggccccatatttcgtgcttctagagattctccacaagtttgctgcgtacgaaccatatcctggcttccatgccaatgctgcagaagctgattgacgccaaacgcaaggagtggccggacaagaaagcaaagaagatgtcctgagctgtgcccaagaacccctgatgcctgatgctacgtctgctgtgtaacagcgaagatgagaatgatctgccctgtttgtcgtctctatgttactgaagataaactgaactgtagactgatatcatcctgatacgtgata

SEQ ID NO: 4449 - DNA, 703 bp, Triticum aestivum
cctccacttcaccgccccgttcccgcgcgccggccgcggtctttcaccgcccgttctacggggccttctacgtctccctcgaccgccgctcgggcgccctcgccgccgtcctctgcctcctctgctgggccgccagctccgccctcgccgcccgactcggcttctccctcggatggaaggtggtattggtagctcagctgttctgttggactatgcaattcattggccatggagtttttgagaagcaggcacctgctctagttgacaaccttgtccaggctttgatgatggccccatatttcgtgcttctagagattcttcacaagtttgttgcgtacgaaccatatcctggcttccatgccaatgtgcagaagctgattgacgctaaacgcaaggagtgggcggacaagaaagcaaagaagatgtcatgaggtgtgaccaagaactcctgatggctgatgctacgtttgctgtgtaacggcgtaagatgagagtgctctaccctggttgccgtttccatgttactgaagataaactgaactgtagactgatatcatcctgagatgtgatacgcttgttgcatgacatcggtgtaagatgagatacgccatgtttggtgttgtgttcgtgttagtggagattttttatataatgaacagtaaagtaataatacattttcaataaagaatctggtgctgtgcct

SEQ ID NO: 4450 - DNA, 549 bp, Triticum aestivum
tggcaggccaaggcgctctcggagcaggccaccgcggtgggccttcacgcgcagctccagcaggccgcctccgcggcgcgggcatcctgcgaggagctgggcggcggcgtacgccggcccggccgtatcgtgctcgtcggcgtacgtagaccctcgccgcgccgggcctgaccgcgcgtgccacggctgccacctcggggcggccacggtggtgctcctgccgtgcagacatctgagcctgtgccgtgactgcttcgccgccggcgacatggacgtggccatggcgtgccctgtatgccattgcgtgaggaccggcagcgtggaggccatcctgtgttgacagagccggcctcggggccatcccgtgccgtgagcgctccgagcaatgcgaaaggcgccatagcttattccggagaatggaaaaatagtcctaaaatggaaaattagattcatttatttctttattagagaatatattgttcatagatttttattaatcattttttaaatgactgaaggttataacatactaaacaagaggaataagta

SEQ ID NO: 4451 - DNA, 1070 bp, Triticum aestivum
acggtttcctgcagccagtgggaatcggaggaagcgcgccagggaggccatggcgccgccgccgccggccaaggaggagtacatcaacctgttcgcgcagcagtcggcgccctttttaaccatggcgcagctccacaacagcagggtcgcgtcgtccccgtcccctgccccggtgacgcgcgtgtccacgggcctccgcctggcattggatgagcagcaacagagacagattaattcattgtgttacccgtcctcgtcctcgccgctcgtccccttctccgatgagttcgccggacagatgaagcagcatggcgacgagctcgacaaattcgtccgggaccagggcgagcagctccgtcgggccatcgccgatcggatgcgccaccacaaccgggcacttctggtggcggcagacaaatcggcctcgcgccggctacgggagaaggcgttggaggcggagtgcgaggcgcgtcgcggcgccgagctggaggagcggctcgcgcggcttcgcaacgaggcggcggcgtggcaggcgaaggcactctcggagcaggccaccgcggtcggccttcacgcgcagctccagcaggccgcctccgcggcgcgggcatcctgcgaggagctggccggcggcgacgccggcccggccgaatcgtgctcgtctgcgtacgtagaccctcgccgcgccgggcctgaccgcgcgtgccacagctgccacctcggggcggccacggtggtgctcctcccgtgcagacatctgagcctctgccgcgactgcttcgccgccggcgacatggacgtggccctggcgtgcccggtatgccattgcgtgaggaccggcagcgtggaggccatcctgtgttgacagagctgtcctcggggccatcccggtcgtccatcccgtgccgtgagtgctccgagcaatgcaaaaggcgccatagcgtattccaacgaatggagaaaatagtcctaaaatggaaacttagattctttctttcttcaaacttttgttcatagttttttttatccttttttacatgccgaggatttacccctcgccgtgtcctcta

SEQ ID NO: 4452 - DNA, 871 bp, Triticum aestivum
tttcaagaagttttgggaggtcatttgatccatctggcttagaggtggcaaccccagttctgctcgagagagatgatggtcataaacacagaagaggaagtcatggcgatatcatctttctaacaagcaggggagaggtgacctcgtacaccccaggcctacttggtcacgatgcgatgtggagatggcagctatcgacaggcgctacatggtccaaccttccatctccatcagggatgatggagaacgtcgtggttcctactctcaagaccttctccctgagagcctatgacccaaagcaggtgatcattgcgggcggagaccaggaggccgtggtgatttctcctgatggcagcctactgacatccattgatctccccgcgcctccgacccacgcgctgatccttgaggatttctccggcgacggtctgaccgacgtcatcctggtgacgtccgggggagtgtacgggtttgtgcagacgaggcagccgggggccctcttcttcagcacgctcgtcggcttcttgattgtcgtgatcggggtgatctttgtctctctgcacctcaactcgtcgaacggtggtaaaccgaggtcgaacggccaaagatgatgactgctacgatctcagccggattctgttgggaggatcttgtgagcatcctcagcacagcagcagtgaggagctgttacagtgtttgaactagacatttttaatatagttagctggagatgtttaacttgtgtaaactttgcacagcttttgtatgtatttttagtgttgaagttttgtttgtggtatgatacgacgacggagctcctacatgacatgattatagttctattactaaagatcatcgattcatataatcc

SEQ ID NO: 4453 - DNA, 1105 bp, Triticum aestivum
gggatagaggctattcatctagcttctggacgtacgctttgcaagcttcatttgacagaaggaggccttcatgcagatattaacggagatggagtccttgatcatgttcaggttgtcggtggaaatggtgctgagcaaactgttgttagcgggtccatggaggtgctgaaaccctgttgggcagttgctacatccggtgtaccagtgcgggagcaacttttcaatgtttctatctgccattacaaccatctcaacctgttccatcatggtgacttttcaagaagttttgggaggtcatttgatccatctggcttagaggtggcaaccccagttctgctcgagagggatgatggtcataaacacagaagaggaagtcatggcgatatcatctttctaacaagcaggggagaggtgacctcgtacactccaggcctgcttggtcacgatgcgatgtggagatggcagctgtcgacaggcgcatacatggtccaaccttccatcttccatcagggatgatggagaacgtctgtggttcctactctcaagaccttctccctgagagcctacgatcccaatagtcaggtgatcattgcgggcggagaccaggaggccgtggtgatttctcctgatggtagcctactgacatccattgatctccccgcgcctccgacccacgcgctgatccttgaggatttctccggcgacggtctgaccgatgtcatcctggtgacgtccgggggagtgtacgggtttgtgcagacgaggcagcccggggccctcttcttcagcacgcttgtcggcttcttgattgtcgtgatcggggtgatctttgtctctctgcacctcaactcgtcgaacggcggtaaactgaggtcgaccggccaaagatgactgctacgatctcagccggattctgtcgggaggatcttgtgagcatccccagcacagcagtgaggagctgttacagtatttgaaccagactttttactatagttagctggagatgcttaacttgtgtaacctttgcagcttttgtatgtatttgtagtggtgaagttttgtttgttgtatgatacgacgaagctccttacatgacatgattata

SEQ ID NO: 4454 - DNA, 619 bp, Triticum aestivum
cgggccatcgccgatcggatgcgccaccacaaccgggcacttctggtgacggcggacaagtcggcctcgcgccggctccgggagaaggcgttggaggcggagcgcgaggcgcggcgcggcgccgagctggaggagcggctcgcgcggctacgcaacgaggcggcggcgtggcaggcgaaggcgctctcggagcaggccaccgcggtcggccttcacgcgcagctccagcaggccgcctccgcggcgcggggcatcctgcgaggagctcggcggcggcgacgccgggccggccgaatcgtgctcgtccgcgtacgtagaccctcgccgcgccgggcctgaccgcgcgtgccacggctgccacctcggggcggccacggtggtgctcctcccgtgcagacatctgagcctctgccgcgactgcttcgccgccggcgacatggacgtggccctggcgtgcccggtgtgccattgcgtgaggaccggcagcgtggaggccatcctgtgttgacagagccggcatcggggccatcccgcccgtgccgtgagcgctccgagcaatgcgaaaggcgccatagcttattccaaggaatggaaaaatagtcctaaaatggatacttag

SEQ ID NO: 4455 - DNA, 701 bp, Triticum aestivum
gccaaatactacctctataaactaatactcttattaggggcagagtacgtaattgtgctaatttccactgtagattttatgtcaaattataaacatagattcttagattaatttgaagtttgattggttgtcaggaaggagcatggtgacaacaacgagggcagttcaggtggcaccggcggcggctgcgggaagcccgtgcgcgagcccaggcttgtggtgcagacgctgagcgatatagacatactcgacgacggcttccggtggaggaagtacgggcagaaggttgtcaagggcaatcccaaccccaggagctactacaagtgcacaacggtgggttgtccggtgcgcaagcatgtggagcgggccgcgcacgacaaccgcgcggtgatcaccacctacgagggtaagcacaaccacgacatgccggtcggccggggtgccggtgccagccgggcgctgccgacgtcatcttcctcggacagctcggtcgtaacctggcctgccgccgtgcaggccccgtacaccctcgagatgctcaccaaccctgccgccggccaccgaggctatgcagccggcggcgccttccagcgcaccaaggacgagccccgggacgacatgttcgtcgagtcgctcctctgctagctcttcgttcccctctggcgtttacatgtgcgtccacgtgtacaatataaatagat

SEQ ID NO: 4456 - DNA, 917 bp, Triticum aestivum
gcggagctactacaagtgcacctacaacaattgctccatgaagaagaaagtggagcgctctctcgccgacggccgcatcacgcagatcgtctacaagggcgcacatgaccacccgaagcccctctccacgcgccgcaactcctccggctgcgcggcggtcgttgcggaggatcataccaacggctcggagcactctggcccgacgcccgagaattcatccgtcactttcggagacgatgaggccgacaagcccgagaccaagcgccggaaggagcatggtgacaacgagggcagttcaggcggcaccggcggctgcgggaagcccgtgcgtcgagcccaggctcgtggtgcagacgctgagcgatatagacatactcgacgacggcttccggtggaggaagtacgggcagaaggttgtcaagggcaatcccaaccccaggagctactacaagtgcacaacggtgggctgcccggtgcgcaagcatgtggagcgggcctcgcacgacaaccgcgcggtgatcaccacctacgagggtaagcacagccacgacgtgccgatcggccggggccgcgcgctgccggcgtcatcttcctccgacagctcggccgtcatctggcctgccgccgccgtgcaagccccgtgcaccctcgagatgctcgccggacacccaggctacgcggccaaggacgagccccgggacgacatgttcgtcgagtcgctcctctgctagctaggcaggctaggccgcggcccttcgttccccctgtggcgtttacatgtgggtccacgtgtacaatataatagatgctacatgtttttttagttgatctgttgagtaaataagcaattgtttgattaatttaatgcaggaatagatcataagcatgatgtttactaagcacatactgatatttga

SEQ ID NO: 4457 - DNA, 666 bp, Triticum aestivum
gtcaggaaggagcatgccgacaacgagggcagttcaggtggcaccggcggctgcgggaagcccgtgcgcgagccgaggcttgtggtgcagacgctgagcgatatagacatactcgacgacggcttccggtggaggaagtacgggcagaaggttgtcaagggcaatcccaaccccaggagctactacaagtgcacaacggtgggttgcccggtgcgcaagcatgtggagcgggcctcgcacgacaaccgcgcggtgatcaccacctacgagggtaagcacagccacgacgtgccggtcggccggggccgcgcgctgccggcgacatcttcctccgacagctcgggcgtcatctggcctgccgccgtgccggccccgtacaccctcgagatgctcaccaaccctgccgccggacaccgaggctacgcggccggcggcgccttccagcgcaccaaggacgagccccgggacgacatgttcgtcgagtcgctcctctgctagctaggcaggctcggccgcggctcttggttcccatgtggcgtttacatgtgcgtccacctgtacaatataatagatacaacatgttttttagctgatgctttttcttgctgttgagtaaataagcaattgtttgattcatttaatgtaggaatactcgataaagcatga

SEQ ID NO: 4458 - DNA, 689 bp, Triticum aestivum
caggcagacatcaaatcaaggtggaatgcacagcatagctgtcattcagatcgagcagcgcgaggaggaagaagagacagctccattggtgtcagcggcatctgccaaccctaccatcgccaatgaggagcacacgacaaatttcttcatcagaacctcccgaggaggagtttgagatgtttgagtctagcaggggcatcaagctgggacttggcgattttgtcttctacagtgtgcttgtggggagggctgccatgtatgatctcatgacggtctatgcgtgctaccttgccatcatcgctgggcttggctgcaccctcatcttgctgtcgatatgcaggcacgcattgcccgcactcccgatctccatcatgctgggagtcgtgttctacttcttgacgcggttgttgatggagccattcgttgtcggtgcttcgaccaatttggtgatgttctgagttctgactaatgttctgtcgttgttgttacatgtgtgtcaagctgaaaagcaactgtgaacatcatgtgggagtgactactactttgttggtcacgtcttgtaggtagacagtcatgtagttatgactaggaaatgtcattgggactttagactcttataaggtagtatcagttttatctgggatcaactagtccatgtcttgtcgtatagtcagttttatttcagtttc

SEQ ID NO: 4459 - DNA, 658 bp, Triticum aestivum
agtcgcagcaccccgattctgccgcccgatcgggcccaaacctgtatgacagggtgggtcagcaggatgattccggtcctgccatggtagaaatgagggatcttggctcagcaagccgtgacatgactacctcaaatcaaggtgtaacagggcagacatcaaatcaaggtgggagcgcacagcatgctgtcattctgatcgagtcagggtcaggaagaagaagaggcagctccattggtgtcagcggcatctgccaaccctaccgtcgccaatgaggagcatacacaaatttctacatcagaacctcccgaggaggagtttgagatgtttgagtctagcaggggcatcaagctgggacttggcgattttgtcttctacagcgtgcttgtggggagggctgccatgtatgacctcatgacggtctatgcgtgctaccttgccatcatcgctgggcttggctgcaccctcatcttgctgtcaatatgcaggcacgcattgcctgcactcccgatctctatcatgctgggagtcgtgttctacttcttgacgcggttgctgatggagccattcgttgtcggcgcttcgaccaatttggtgatgttctgagttctgactaatgttctgttgtcgtagtaacatgtgtgccaagtgaaaaagc

SEQ ID NO: 4460 - DNA, 1272 bp, Triticum aestivum
tccagtgtcctcttctccatgggcgggccatcgccgtcgccctcctccgccggctcgacgccccgctcgaggcgcccaccgggctcctcctcctcttcaaagcatccgccgtcggcgtcctctccgtgttcgcctccgctggtccccatcctcgtccgccagtggcgtacatggtctgcgctcgccgtctatcgtcagactgtcttgggtcttccaggctcccctgagtggaccacctggatcatgcgtcctcgccgtcgcattctatgacctcgtcgccgtggtcgcgccaaggggcccgctcaggatgcttgtggagctcgcatcctccagggaagatgaacatcccggcgctcatctacgaatcacgccccacggtaggcccagccgagacttcctcctcctatgctccggcaatgtggtccgaggagtcgcagcaccccgattctgccgcccgatcgggcccaaacctgtatgacagggtgggtcagcaggatgattcgggtcctgccatggtagaaatgagggatcttggctcaacaagccgtgacatggctacctcaaatcaaggtgtaacagggcagacatcaaatcaaggtgggagcgcacagcatgctgtcattcagatcgagcagcgtcaggaagaagaagaaacagctccattggtgtcagcagcatcggccaaccctactgtcgccaatgaggagcatacacaaatttcttcatcagaacctcccgaggaggagtttgagatgtttgagtctagcaggggcatcaagctggggcttggcgattttgtcttctacagtgtgcttgtggggagggctgccatgtatgatctcatgacggtgtatgcgtgctaccttgccatcatcgctgggcttggctgcaccctcatcctgctgtcgatatgcaggcacgcattgcccgcactcccgatctccatcatgctgggagtcgtgttctacttcttgacgcggttgctgatggagccattcgttgtcggtgcttcgaccaatttggtgatgttctgagttctgactaatgttctgttgtcgttgttacatgtttgtcaagctaaaaagcaattgagaacatcatgtgggagtgattactactttgttggtcacatcttgtaggtagagagtcatgtagttatgactaggaaatgtcattgagactttaggtaacgtcagttttatctgggatcaactagtccatgtctcgtcgtatagttctatcaacatggcatggtattcgagaagaacacat

SEQ ID NO: 4461 - DNA, 482 bp, Triticum aestivum
cgccgccatgctcgccgagaagatgcagacgtacggcgccaccgggtggcttgtcaacaccggctggtccggtggaaggtacggcgtcggcaagcggatcaagctgccatacatccaggaagatcatcgacgccatccactccggcgagctcctcacggccaactaccagaagaccgaggtcttcggcctcgagatccccaccgcgatcgagggcgtgccgtctgagatcctcgacccgatcaatacctggacggacaaggccgcgtacaaggagacgctcctgaagctggccggcctgttcgggaagaacttcgaggtgttcgccagctacaagatcggggaggacagcaccctcaccgaggagatccttgccgctggacccaaagtctgatttcccacgaagcagatgaagagcgcgatgcggtggaattgtgttttttcagaataaagcagtggtgtgtgtgtgtgtgccgtgtaggtc

SEQ ID NO: 4462 - DNA, 719 bp, Triticum aestivum
atcatgctccacccgaccaagtacgccgctatgctcgccgagaagatgtcagacgtatcggcgccaccgggtggctcgtcaacacccggctggtccggcggaaggtatcggcgtcggcaagcgggatcaagctgccgtacaccaggaagatcatcgacgccatccactccggcgagctcctcacggccaactaccagaagaccgaggtcttcggcctcgagatccccaccgccatcgagggcgtgccgtctgagatcctcgacccgatcaacacctggacggacaaggcagcgtacaaggagacgctcctgaagctggccggcctgttcgggaagaacttcgaggtgttcgccagctacaagatcggggaggacagcaccctcaccgaggagatccttgctgctggacccaaagtctgatttcccgccaagcagatgaaaagcgcgatgcggtggaattgtgttttttcagaataaagcagtggtgtgtgtgctgtgtgtgctgtgtaggtcgatgatgatgacgaaaaatgggtccatgtgcggggggtactagtagagttggttccgtatatttttcatgcgcaatgttaagtttctgtcacagattggtgcttgttttggctatgtatagatgcactgtgctttcatatttggaactcggatcggtctgcctgatatgatcgtatgagtgtatgaccctgtcttctcccctgttaa

SEQ ID NO: 4463 - DNA, 950 bp, Triticum aestivum
caaatcgaggctggggtcttcgctgttgggagcctattcgtgctggtgcatttatttgtgagtatactggggaggtcatcgatgagcttaaagttaacttggatgacagtgaagatgattacatttttcagactgtgtgccctggtgagaagacgctaaaatggaatttcgggcctgaacttataggtgagcaaagcacgtacgtatcagctgaggaatttcagccactgcccatcaagataagtgcaaaaaagatgggaaatgtctcgcgtttcatgaaccacagttgctccccaaacgtcttctggcagccagtgcagtacaaccatggagatgacaagcacccacacataatgtttttcgcacttaatcacatcgctcccatgacagagttaacctatgactatggtgtggttggagaagagaccagtcatagagccaagacctgcctgtgtggatcattaacctgtcgtgggttattttgatgtacattgtggtggatcaacatgcaagccaataagctagatgtttctgttgctacctagattgtacctatgtcgtcacattggtttctgcgaagatggcgtcgcttctggagtgagaagacagtaaattatcttggagctgagacagaatgctcgttgccgtgttattgcctcgccatttgttcagatagatacttctggatgattgcgtgtattgatgtatgtactgctgcaaatctgtcttgtcttgcttttttcgccaaccatttgcaaccatctgtgtagtaggctagcgtcagttttaactggattggacctctggctgttagctgcttgcgacttgtccgactcggtgctcgctcttaaaacatgtcgcttggttgtactttctgtgttgccggatgtgtctatgatacccactcgcttcgctggcatgtgggatctggaccagagtgtagtgaaccc

SEQ ID NO: 4464 - DNA, 659 bp, Triticum aestivum
cacgtccacctccccgcccggcgagcacaagcgccccgcgccatctcgcccgcaccctcttttggccaggtcccggctttccaggacggtgatctcatccttttcgagtcgcgcgcgatttcgaggtacgtgctccgcaaaggcgcatccgatctactccgagaaaacagcctcgccgagtcggcgacggtggacgcgtggctcgaagctgagtcccacaacttcgacagggccatgtcggcgatcaccttccagtgcttcgtcgtgcccatgttcatgggcgggacgactgaccacaaaatcgtcgaggagaacctggagaagcttaaggcggccctcggagtctacgaggagcgtctgaccaggttcaaatacttggccggagatttcatcagcctggcggacctgagccattgccccatggctcactacctgctggccagcccctgcgcgtcggtgctcgatgcgtatccgcgtgtgaaggactgggttgatgggatgatggatcgaccgagcgtgaaaaaggtcatggagcttatggatgcgtcatgaaaagagcggtgtggtgtgtgctttgtggagactatgtgagatgtgctggtgcagatgatttgtcttgtttgtaataactctttccatttcgagagaaacttagccga

SEQ ID NO: 4465 - DNA, 637 bp, Triticum aestivum
tggtgtgcctggaggagtcggcgccgagtacgagctggtgcacgtccacctccccgccggcgaccacaagggccccgcgcatctcgcccgcaccccctttggccaggtcccggctttccaggacggcgatctcatccttttcgagtcgcgcgcgatttcgaggtacgtgctctgcaaaggcgcatccgatcttttaagggagggcagcctcgccgagtcggcggccgtggacgcgtggctcgaagccgagtcccacaacttcgacaaggccatgtcggcgatcaccttccagtgcttcgtcgttcccatgttcatgggcgggacgactgaccacaaaatcgtcgaggagaacctggagaagcttaaggtggccctcagagtctacgaggagcgtctgtccaggtcacggtacctggccggagatttcatcagcctggcggacctcagccattgccccatggctcactacctgctggccagcccttgcgcgtcggttctcgatgcgtatccgcgtgtgaaggcttggattgatgggatgatggatcggccaagcgtgaagaaggtcatggagcttatggatgcgtcgtgaaaagagttgtgtggtgtgtgtactttgtggagtggaagttgtctgaga

SEQ ID NO: 4466 - DNA, 628 bp, Triticum aestivum
ctctgctcttcccgcagcagatcccgtcccactgttcacgaagcttctcatcctcttcctccctccctctcgcaccgtccgtgaaagcgcctcgccgtatccgtgctccatctaaccctatcatccaaacacctctttggttagagttagttcaggattagtttagggttagaatctaattctaacctctaaccgagttagagtatctaaacagggcctttgtcgtgcccatgttcatgggcgggacgactgaccacaaaatcatcgacgagaagctggagaagctgaaggtggccctcggagtctacgaggagcgtctgtcgaggttcaaatacttggccggagatttcatcagcctggcggacctcagccattgccccatggctcactacctgctggccagcccctgcgcgtcggttctcgatgcgtatccacgtgtgaaggcttggattgatgggatgatggatcgaccgagcgtgaagaaggtcatggagcttatggatgcgtcgtgaaaagagttgtgtggtgtgtgctttgtggattggaagttatcttttttcttaagatgtgctggtgcatacgattcgatttgtttcaccactctttccatttgaataggacgggatat

SEQ ID NO: 4467 - DNA, 635 bp, Triticum aestivum
agagctattggggactggcacatggaaggaatgaaagcattgtgatggttttgggcctcttaagtgcggagccggaggtgatgatgcggaatctttactgaggaggacgaattcctgatcatcggctgcgacgggatctgggatgtattccgcagccaaaatgcggtagactttgcacgcaggaggcttcaagagcacaatgaccctgtcgcctgctgtaaagagttggtcgatgaggccatcaagaggaagagcggcgacaacctttccgtagttgtcgtctgcttcaactccatagcgcctcctgtcttaacagctcccaggcctcgcgtgcagagaagtatatccgcagaaggcttgagggagctgcagggcttcctcgatagcttggcggactgatatgtgtggcttgagaaccctggcaggtggcagcgctgtagtaatcccatttttccatagcctagcttggaatttaggtttagtatgtgccccatctcataacctgagatggttgttgttgagtaatgcatcactgtaacatattatgcggctaattttatctgcacctggaggtacttatttgcttgtttcggacactgctagacttcacaagtttgaaaggttcacagagattc

SEQ ID NO: 4468 - DNA, 933 bp, Triticum aestivum
  N_region (467)..(467): n = any nucleotide
  N_region (501)..(501): n = any nucleotide
  N_region (621)..(621): n = any nucleotide
  N_region (626)..(626): n = any nucleotide
atgggcatggtggtagcacgctgcggactttgtgtgctagcaatgttgccataggttcatcgttgtagggtgatggttttccaggggagatagagtagctgtctcctcagcattcttacagactgatgctgcttttgcagatgcttgctctgtgaactcctctcttgcatctggcacgactgcgcttgctgcactcatcattgggaggtcacttctggtggcaaatgctggtgattgtagagcagttgtatgttgccgtggaaaggcgattgagatgtccagggaccataagccatcttgcacagagagaagatgcgcattgaagcctcaggtggttatgtttacgatggatacctgaatggactgctgaatgttgctagagcaatcggggactggcacatggaaggaatgtaagcatgtgatggtcttgggcctcttagtgccgagccagaggtgatgatgcggantcttaccgaggaggacgaattcctgatcatcggntgcgacgggatgtgggatgtattccgcagccaaaatgcggtagactttgcacgccggaggctccaagagcacaacgaccctgtcgcctgctgtaaagagttggtcgatgaggccatcaanaggangagcggcgacaacctttccgtagttgtcgtctgcttcaactccatagcgcctcctgtcttaacagctcccaggcctcgcgtacagagaagtatatccgcagaaggcttgaaggagctgcagggcttcctcgatagcttggcggactgacgtgtgtggcttgggaacccctggcaacgctgtagtgatcccatttttccatagcctagcttggaatttaggtttagtatgtgccccatctcataatctgagatggttgttgttgagtaatgcatcactgtaacatattctgcggctaattttatctgc

SEQ ID NO: 4469 - DNA, 620 bp, Triticum aestivum
cctgaatggactgctgaatgttgctagagcaatcggggactggcacatggaaggaatgaaagcatgtgatggtcttgggcctcttagtgccgagccagaggtgatgatgcgaaatctcaccgaggaggacgaattcctgatcatcggctgcgacgggatctgggatgtattccgcagccaaaatgcggtagactttgcacgccggaggctccaagagcacaacgaccctatcgcctgctgtaaagagctagtcgatgaggccatcaagaggaagagcggggacaacctttccgtagttgtcgtctgcttcaactccatagcgcctcctgtcttgacagctcccaggcctcgcgtacagagaagtatatctgcagaaggcttgagggagctgcagggcttcctggatagcttggcggactgacatgcatggcttgggagccctggcaacgctgtagtgatcccatttttccatagcctaccttggaatttaggtttagtatgccccatctcatagtctgagattgttgttgttgagtaatgcatcactgtaacatattatgcggctaattttatctgcacctggaggtacttgtttacttatttggacgctgtctagacgt

SEQ ID NO: 4470 - DNA, 1224 bp, Triticum aestivum
cctgcagtccatctaccacattgaggcccgggttcgccgagttcgcccgccaagccgtacgcctcaaagtggtacatgcggatcatgtggcctctgtcctggctctccatggtgctcacgtgggcgtacggttcttggttcaccgttgagaggaatgtcatggagaaactcaataatccagtcttgggccataccaagatacaatttccattatggattgaactgggagaaggaagcaattaataacctgattgtgaaggcaatatgtgaagctgacaagaagggggctaaagttgttagccttggactcctgaatcaggcccagagcctcaacggaagcggagagctttatctacaaaagtacccaaagttggggttgaaactggtggatggaaccagtctagctgctgcagtggttgtcaatagtattccccatggcgcggaccaagttgttctttcaggaaacatttccaaggtggcctgtgctgtggctgcagctctatgcaagaaaaatatcaaggtgataataacaaacaagcaagactatcatttccttcagcccaaaataccagaagatgcagctgacaaccttttactgtcgaaataccggcattgccaaggtgtggataatcggagacggtgcagatgccagcgaacagctcagggcgccgaaaggaacacggttcatcccgtactcacagttcccaccaagaatggcacgcaaggacggctgcacatactcgacgactccagcgatgagcgtgcctaaaacactgcagaatgttcattcgtgcgagaactggctgccaaggagggtgatgagcgcgtggcgcgtcgcggggatcgtccatgcgttggagggatgggacgagcatgagtgcggggacacggtgctcgacatggacaaagtttggtctgctgcactgctgcatgggtttcgccccgtcgccgaagcttgatcgtctggttgcaggtcgagtgaataagcgttaggcagatgaggatgccgtatgctcgctggagccgtgccgaggaagaagaagcagacggttagcagatgagtagcctataattaatcaagtactgctagtttgatctactaccaaggttacttggttagctattactactgcattgttcatctcctatgataatgagttaatgagacttggttcgacctatttctagcgctatctgcccttgcgtcacacaatgcattcacca

SEQ ID NO: 4471 - DNA, 616 bp, Triticum aestivum
  N_region (327)..(361): n = any nucleotide
aaggagaacaggccagagaaaaataggttggccgatttcctggaccctgaggtcaagaggtggtcgaatggaaaggaaggaaacctgagagccttgttgtccactctgcaatatatccttggagctgacagtggctggcaaccagtgccgcttaccgatctcatcacagccgctgccgtgaagaaagcctacaggaaggcgaccctctgcgtccatccggacaaggtgcagcaaaggggcgcgacgatcaggcagaagtacatctgtgaaaaggtcttcgatcttctaaaggatgcttggaacaagttcacctcggaggagcgctannnnnnnnnnnnnnnnnnnnnnnnnnnnnnnnnnnagccggattcattttgctagttgcatagccatattgttggttctttccattggatattgctgtaaataggcagctcggtctaggtaccattctagatgatgatagaagactcgaaggcggtctcggttgaaagagagagctccgttgttctggaaatgaattgtgatgttccagtccagacctgggtagcagtctagtctagtagcaggacatctaatctaataggcaccttgactgtggtggagttgaagatta

SEQ ID NO: 4472 - DNA, 1002 bp, Triticum aestivum
gctcgggagagggcgattaagaaggccaaggccgagaaggctgctgcggaggcaagagaacgcagagaacaaatcaggtcctcttccaaggatgttcgacaggacaatcagtttcagagggcaacttccagtggttacgtaagaaatacagattctagtagcaaagtggttgattccgagtcggctttaaggcataaggcaagaatagagaggcatcaacgcacaactgagcgtgtgtcaaaagcactcgcggagaagaacatgcgtgacctgatggctcaaagagaacaggcagagaaaaataggttggccgatttcctggaccctgaggtcaagaggtggtcgaatggaaaggaaggaaacctgagagccttgttgtccactctgcaatacatccttggagctgacagtggctggcagccagtaccgctcacagatctcatcacagccgccgccgtgaagaaagcctacaggaaggcgactctgtgtgtccatccagataaggtgcagcaaaggggcgcgacgatcaggcagaagtacatctgtgaaaaggtcttcgatcttctaaaggatgcttggaacaagttcacctcggaggagcggtaggatgggagtgatggatggatggacagaagccggattcattttgctagttgcatagccatattgttggttctttccattggatattgctgtaaataggcagctcggtctaggtaccaccattctagatgatgatagaagactctgaagcggtctcggatgaaagagagagctctgttgttctggaaatgaattgtgatgttccagtccagacctacctgggtaggtctggactgcaacatcacagttcatttccagaacaacggagcgtctctctctctctttcaaccgagaccgcctcagggtcttctatccatcatctagagtgccgcctagaccgagctgcctatttacagcaatatccaatggagagaaccaacaatatggctatgcatctag

SEQ ID NO: 4473 - DNA, 683 bp, Triticum aestivum
gcggctgttctggtgcatctctgtaatggcgaccagcagcaacagcatcttgcagaagcacaggagcagggcattgtgaccttgctggaggagctagcagaaagcggcacagacagggggaagagaaaagcgatccagttgcttgaacggatgaataggtttctgaagcagcagagccaagcccagggagacgcgatggcacaggcgcatgctcagtcccaaaccctgtcccaggctctggttcaagttcaagcagatactcagctagaggaatcactgcctcctacatcatctcatcttcctgagagatgaggtgaatgatcattagctccccattctaggtagtggtttgtttttgggccgtctgccaggtggaagacctcctgcaattcttgctctgcaggtgtgcgttttggctgtacaatgttgtcaggaataggaaggcccggcagcgcagcgtgatttagggctgtgagcatgttgacaggtcagttttgcaaccatggttggtgctgttaactcgtgtttgtttgtagttggtacaatgtgtcggtgattcaaggtaggatcctcgagttttagggaggtatatcgtcatgcttgtactgggtgcctggtacatgactaatttgtggcttcctagggtggtaattttacttgtctgagaaagaagagaacttcag

SEQ ID NO: 4474 - DNA, 873 bp, Triticum aestivum
gctgttgctgcatcctttttaacttgtgtatctatcagggcaacaagggtaaagctgttagagctggattggtccctatactacttgaacttctaacagagactgaaagtggaatggttgatgaggccctggctatactggcaattctctcgagccatcctgagggaaaggcagccatcagcgctgccgccgccataccaattctagttggagttatcaggaatggatcctcgaggaacaaggagaatgctgcggctgttctggtgcatctctgtaatggtgaacagcagcaacagcatcttgcagaagcacaggagcagggcatcgttaccttgctggaggagctagcagaaagcggcacagacagggggaaaaggaaagcgatccagttgcttgaacggatgaataggtttctaaagcagcagagccaagcccagggagatgcgatggcacaggcgcatggtcagtcccaaaccctgtcccaggctctggttcaagctcaagcagatactcagctagaggaatcactgcctcctacttcatcccatcttcctgaaagatgaggtgaatgatcattagcttctcattctaggtagtggtttgtttttgggccgtctgccaggtggaagacctcctgcaattcttgctctgcaggcgtgcgttttggctgtacaatgttgtcaggaataggaaggcccggcagcgcagcgtgatttagggctgtgagcatgttgacaggtcagttttgcaaccatggttggtgctgttaacccgtgtttgtttgtagttggtacaatgtgtcggtgattcaaggtaggatcctcgagttttagggaggtatatcgtaatatgcttgtactgggtgcctggtac

SEQ ID NO: 4475 - DNA, 622 bp, Triticum aestivum
ttcagttctattcgcagcagtggagaacttgggccgcttgtttcatacaagcggcctggcacaggcgctgcagaaagaagatggaagatgctctgcgcgagaaggaggaaaggctgcaactcgcgattgtgaatgacggttccactccgctcagcttcggtgcggcaatatacgcttcacgttttgctcgcaacatgatgcggatcttgaggagaaatgccacccggaaggcccggctgcaggaaagggtgcccgcaaggctgttgcagaagccagctagaacccaacttttctgcagaggagcagtagtttgcatgaatgccttgatggtgttattcttctgcacgatctgtgcggttgcactcgctgatgcgtgcttacggttttcgctagcggttcaaaggcgggctgggggatcgcagtagcgtgatgaattgaagtgatgatatacttgcttcctggtctcgacactaacactagatttgcttgtatatcacatataggtaatggtgtgatttgagttagtaatctggtcttttgtactactacgtttgtgcatagcgagcgcagcccagtcctctttgtgtaggatgcaaaacatagtcccactgtgttagacagt

SEQ ID NO: 4476 - DNA, 875 bp, Triticum aestivum
tgaggggaccgtaaggaaatgatctttatcacgagagaacctcatgagcatgaccacaccgtggaaaactggcttcttcaactctgatgttctgaaaagtggagatttctgtggcgaggagcttcttacctgggctcttgatcccaattcagcaaccagtctccccagctcaaccaggacagtgaagtcaatgtctgaagttgaagcctttgctttgatggctgaagacctgaagtttgtagccacacagtttcgccggctacacagcaaacagctccggcacaccttcaggttctattcccagcagtggagaacttgggccgcttgtttcatacaagcggcctggcacaggcgctgcagaaagaagatggaagatgctctgcgcgagaaggaggagaggctgcaactcgcgattgtgaacgacggttccacttcgctcagctttggtgcggcaatatacgcttcacgttttgctcgcaacatgatgcggaccttgaggagaaatgccacccggaaggcccggctgcaggaaagggtgcctgcaaggctgttgcagaagccagcagaacccaacttttccgccgaggagcagtagtttgcatgagtgccttgatggtgttattttctgcacgatctgtgcagttgcatcgctgatgttgcttacggtttttgctagcggctcaaaggtgagccggaggttcgcagcagcgtaatgattgaatgatgatatattgctacctggtgtagacagtaacacatataggtaatggtgtgatttgattagttatctggtcttctgtgctgtacatcatttgtgcatagtgagcgcagcctagtcctctttgtgttgccatcagaggatgcagcatagtccc

SEQ ID NO: 4477 - DNA, 629 bp, Triticum aestivum
cttcaggttctattcgcagcagtggagaacttgggccgcctgttttcatacaagcggcctggcacaggtgctgcagaaagaagatggaagatgctctgcgcgagaaggaggaaaggctgcaactcgcgattgtgaacgacggatccacctcgctcagcttcggtgcggcgatatacgcttcacgttttgctcgcaacatgatgcggatcctgaggagaaatgcaacccggaaggcccggctgcaggaaagggtgcctgcaaggctgttgcagaagccagcagaacccaacttttccgcagaggagcagtagtttgcatgaatgccttgatggtgttattttctgcacgatttgtgcggttgcatcgctgatgttgcttacggttttcgctaacggttcaaaggcgagctgggggatcgcagtagcgtgacgattgaatgatgatatattgctacctggtctagacagtaacactagatttgcttgtatatcacatataggtgatggtgtgatttgattagtaatctggtcttctgcacttctggtgatggagtactactttgtgcagcccagtcctctttgtgttgccatcagaggatgcaacatagtcccactgtgttagcagctgat

SEQ ID NO: 4478 - DNA, 609 bp, Triticum aestivum
  N_region (594)..(594): n = any nucleotide
  N_region (600)..(600): n = any nucleotide
tcttattggcatataccatgattggtgcgaagccttctctacgtaccctaggacatatgacctgatacatgccagcggcgtcttcagtttgtatgagaacaagtgtgacctggaagacattcttcttgagatggataggatcttgcgtccagagggcactgtcatactgcgggacaatgtcgaggtgctgaacaaggtcaggatgacggtgacgggaatgcgatggaagtccaagctacttgatcacgaagatggccctctcgtgcctgaaaaacttctgattgctgtaaaaacgtactgggttggcagcaaagaaggaagcggttcatagactctcttaccctgcgtcaagattttggacttctgattgctgttgggtgccgcgttggctgcagagaaggacacagttcatagattctatgcctgcatcaaggattttggacttccggttgatgttaaagagcagcgaaaaagtacagttcatagattcttatccatgtgcatcgattaatagagcttgttcatagatacagatctctgttgagtacgtatagtggcaaacattataattgtggcagttgacccactgcgtgnggtaangaaagaaca

SEQ ID NO: 4479 - DNA, 738 bp, Triticum aestivum
taaacaattgataggaattcgaaatataggaatatcatgaacatgaatgcagcctcgaatttttctgcagtgcttggattctccggctctggttcatgaacgtttgtgcctacatatcagagaggaacactcttggcatcatctatgagcgggttcttattggcatataccatgattggtgcgaagccttctctacgtaccctaggacatatgacctgatacatgccagcggcgtcttcagtttgtatcaaaacaagtgtgacctggaagacattcttcttgagatggataggatcttgcgtccagagggcactgtcatactgcgggacaatgtcgaggtgctgaacaaggtcaggaggacggtgacgggaatgcgatggaagtccaagctacttgatcacgaagatggccctctcgtgcctgagaaacttctgattgctgtaaaaacgtactgggttggcagagaagaaggaagcagttcatagactctcttgccctgcgtcaagattttggacttctgattgctgttgggtgccgcgttgggaaacagttcatagattctatccccgcatcatgattttggacttctggttgatgttaaagagcagcgaaaaagcaacagttcatagattcttgatccctgtgcatcaattaatagagcttgttcatagatacagatctctgttgagatggtatagttgacaacattcatatgtgcatgtcgataaagaaaatatt

SEQ ID NO: 4480 - DNA, 1005 bp, Triticum aestivum
atttggcagaaaaaggcaaattcaaatgcatgccataacaagaatggtcgtaccagcaagatgtgcaacgttcaagatgcagatgacatctggtataagaaaatggaaacctgtataacacctatcccagagggagcacagcagctacagaagtttccacagagactatttgcagtccctcccagaattctagaaggtaccccaggtgttacagaagaagtctatgaagaggataagaagttgtggaagaagcatgttgatacatacaagagggtaaacaagttgatagggaagtcaaggtataggaatatcatggacatgaatgcaggccctggaagttttgctgcagtgctggattctcccggctcctgggtcatgaacgttgtgcctacgatatcagagaggaacactcttggcatcatctatgagcggggtcttattggcatataccatgattggtgcgaagccttctctacgtaccctaggacatatgacctgatacatgccagcggtgtcttcagtttgtatgagaacaagtgtgacctggaagacattcttcttgagatggataggattttgcgtcccgagggcgctgtcatactgcgggacaatgttgaggtgctgaacaaggtcaggagtacggtgacgggaatgcgatggaagtccaagctacttgatcacgaagatggcccgctcgtgcctgaaaaacttctgattgctgtaaaaacgtactgggttggcagcaaagaaggaagcagtccatagactctcttgccctgcgtcaagattttggacttctgattgctgttgggtgccgcgttaggaaacagttaataggttttgtccctgcatcatgattttggacagcgaaaaagtgacggttcatagattcttgatccctccacatcgattaatagtgcttgttcatagatacagatctctgttgagatggtatagttgacaacattcatatgcgcatgtcgataaagaaacattaattgatgg

SEQ ID NO: 4481 - DNA, 995 bp, Triticum aestivum
catatgaaggaccctgtcagcagggcattatccacctgacatgtgggaatgtagtgccatcgaccagatggaacttggccaactttaagggaaactatttctaaagttggagtaagaaactctctttctggtggctccaatgcccactgcattccactagtcagattcttggcaacaatgagtgctttgaaccctacacatctaacatctacagtcggcgggttctaagtggggagtttgtcgtggttaacaagcatcttctccatgacttgactgagatgggtatctggacacctgctctgaaaaataagataatttatgaagatggttctattcagaagatggaagaaatccctgatgatcttaaagcaatttacaagactgtttgggagattaagcagaaaactctggttgacatggctgttgatcgtggatgctacatcgaccagagccagagccttaatgtccacatggatcaaccaaactttgcaaagctaacttcgttgcatttccatgcttggtccaagggcctgaaaactgggatgtactatttgagaacaagggcagctgctgatgcaatcaagtttactgtggacactggctttctgaaggtcaatggggatgctaatggcactaatggcactaatggcactaacggcaaactagcagaggaagacgatgaagccaaaatggcgcaagtcgtctgctccttgaacaaccgggaagaatgcctggcatgcgggagctagatgcatctcttgcatctgtttttctcttaaccaaggcaggcattacacaaccaagtggtctgatcattggcgttgaataattgagaagtgagtcgtttatgactttatgtaggtgtggttgggtttaagatctgatgagttcctttgctgggcagcccttgacggctgagttgccaacgttggcttgtgttgtatttgtactatctaaaaacatgggttgctgcagctgtaatgtatatatatgta

SEQ ID NO: 4482 - DNA, 712 bp, Triticum aestivum
gatgggtatctggacacctgctctgaaaacaagataattttatgaagatggttctattcagaagatggaagaaatcccagatgatcttaaagcaatttacaagactgtttgggagattaagcagaaaactctggttgacatggctgttgatcgtggatgctacatcgaccagagccagagccttaatgtccacatggatcaaccaaactttgcaaagcttacttcgttgcatttccatgcttggtccaagggcctgaaaactgggatgtactatttgagaacaagggcagctgctgatgcaatcaagttcactgtggatactggctttctgaaggtcaatggagatgctaatggcactaatggcaaactagcagaggaagacgacgaagccaaaatggcgcaggtcgtctgctccttgaacaaccgggaagaatgcctggcatgcgggagttagatgcatccgttgcatctatttttctcttaaccaaggcagccattacacaaccaaacggtctgatcactggcgttgaataattgataagtgagtcgtttatgtaggtgtggttgggttcaagatctgattgagttcctttggtgggcagcccttgatggctggagttgccaacgttggcttgtgttgtatttgtactatctaaaaacatgggttgctgcagctgtatatatatgtatcgttgttcgtgttattgatttg

SEQ ID NO: 4483 - DNA, 688 bp, Triticum aestivum
atttgtgctgtatgtcacacagcaagttcaaggtcatgaatcatacaactgcagatacacactggggagtacccaagctgacatttattcagacaagctattcaattgcactgctgaggatccttcaataattgaaatgctgaagaggatttttgtactgttttcaaagttctgcaagtcaaaagatttcagttcgtggtggatgcttggatatgcggcagcaggggttgtggcgggcgtggtgagctctatactcatcaccatagcagtaagagtcctccgaggagtgttccttgctgccgccaggcgggctgtgagcaaccatagcatcagggtctttgcttaccgtttcaagcgggcgtgccttcttgttgcgtatatatctttcgttggctggatcaccttgcagtacagcaaaatggttgggctgaaggagcttgtgctggacttcaaactcctggagaggttcttgtaaaatgtaaatgggtttcggcaatgtatatcaaataagccgatccccttgtgtgatgtaacctagtgtaacttatcctgccttgcttcgatatgcggccgcccatgaacaggtggatgaatcatgggtggctgcagttggcatggagtaactcccatctgttgtaacctgcagtgcaacatgtgtcaaaagcatcctaatgacagttggggggct

SEQ ID NO: 4484 - DNA, 895 bp, Triticum aestivum
gactccacgagatcatccaatgcaacgtcgaagggtacacatgcagaatcgagggctgtacgatgagctatcgacacgagaaatgaactgtccctgcatgagctcgacatctgaccggtcaagggatgtggaaagaagttcttcatgcacaagtttctgctgcagaaccacaaggttcaccaccgaaacgacgaagcaactgaagaaagctacaggagaggagagggctccaactccaagagatcatccgatgcgcgtggaagggtacacttgcactatcgacggctgctcaatgagcttcgacacgaaaaaggaactgtccctgcacgagcgtgacatctgcccggtcgagggctgtgggaagaagttcttcacgtcacaagtatctgctgcagcaccgcaaggttcacaccgacgaccggccgctcaagtgcccgtgggagggctgcgacgtggccttcaagtgggcatgggccaggacggagcacctcagggttcataccggcgacaggccctacgtttgctgcgagccagggtgtgcagagacgttcaggtttgtatcagattccagccgtcacaagcgcgagacaggccactcaaccaagcagactaaaaccaagacatgaagcaggtgcaaaagttatggtatactagaagcgacaggggtaagtttgtatatagtgcaccagtacccggagctcacgattgtcttcatttagcgaattctattagtaagcaccacaatgggtgtgctttcctatgtacgtatctaatttcgatcattggtcatttctatgattactgatttagctagtctagcagtttagcactgatgttatgtctgatgtattgacgttgtcactatataaatgccatgtttaatatgatcaccatc

SEQ ID NO: 4485 - DNA, 899 bp, Triticum aestivum
catgaatgttcaaagagagcaggcagaaagagatagaatttcggaaagtctagacttcgagattaagcgatgggctgctggaaaagaaggcaatttgcgggcactgctatcaactatgcaatatgtactttggccagaatgtggatggcagcctgtatccctaacagatctgatcactgctgctgcggttaaaaaggtgtacagaaaggcaactttgtgcatccatcctgataaggtgcaacaaaagggtgcaaatctacagcagaaatatatcgccgagaaggtttttgatcttcttaaggaggcctggaacaaatttaactctgaagagctcttctaaacattactatgaggaccatcttcgcccgtgtaaggtactcgagaagtccgcccaccgtgcatcatcacctcctttgactgcttgaggtgctcaaggaggaacgtccaagctggagcggccggtcatgccgtcaggggaaacaatgaagtgatcaagtgaaagccccacccgccattatttgttattgtattgctgtttgcttactgcatccatcttccttccaccttgtgcatgtgttgattcgacgactattcgcagctgctacatgccagcggaccttcaaccagtaggtgtatattagcgtcctttttgctcggttgatggtgggttgtgtgtagcagcggagcgggttcggtgttgtgatttttggggtccaatgtgcttcattttacttcgggaaggccaacgttacatggattcatggcttgtcacctgtttgatgccatggccactgtcatacgttatgttgtgttgtttattgggaactgctggtgcaaccatgggagttggagccgtgcctagtgatttttttcctgtatgatttcgttataaagttgat

SEQ ID NO: 4486 - DNA, 665 bp, Triticum aestivum
taaggaccacggaatgagcatgaggcccatccctggcatgtttgtctgatatcttctagttccaaggagaagaggaaccacgccaaccaaccatccgatgtcaaaaggacacgtagggatcgccgggaactggaaaacattatcttcaagcttttcgaaaagcagcctaactgggcactgaaggctctagtgcaagagactgaccagccagagcaattcctcaaggagatattgaacgacctctgtatgtacaacaaacgagggccaaaccagggcacgcacgagctcaagcccgagtacaagaagtcgtctgaggacgctgccggtgccccgtgaagatgatctatctgttttggcggctgttgtgtaactgtgataccaggaacctgttggcttgatgcgcggaactatgagttgtctatgtgaagcctccagtcatgcttgggctgcatttgcttgctttttattaagaggcattgttgtaattgtatgggtataagatgatacatatacaacacatgtcacagagaggaaatggatctactgataaaccacacgaaagattgtttgattttctgggtagatgtaagaatcatgtcgaggattcgacgtgtgcgatccttgttccttttgagaactcccgtacttcaataccatccagatgt

SEQ ID NO: 4487 - DNA, 639 bp, Triticum aestivum
tcagggaaactctcatgtgaaggaaaagtcgagcataaattcgacatggaacctcacaaggataacttattaaactacgcgaagttatgccgtgaaagaacacaaaagtcgatggttaaaactagaaaagtgcaggtacttgataatgaccatggaatgagcatgagacccatgcctggcatggttggtctgatatcttctagttccaaggagaagaggaagccaacgccaaccaaaccatccgatgtcaaaaggacacgtagggaccgtcgggaactggaaaacattatcttcaagcttttcgaaaagcagcctaactgggcactgaaggctctagtgcaagagactgaccagccagagcaattcctcaaggagatattgaacgacctctgtatgtacaacaaacgaggtccgaaccagggcacgcacgagctcaagcccgagtacaagaagtcgtcggaggacgccgccggtgctgctccgtgaagacgatttgcgtatccgactgctgttgtataaccgagtacctgttggctttgatgtgcggaacgatgagttgtctatctgaagcctccgatcatgcctgggctgcatttgtttgctttttattaagaaggcactgttgtaactgtatgggta

SEQ ID NO: 4488 - DNA, 869 bp, Triticum aestivum
cctccagttcaagatggagatgtctcaaactagtgtagccagcacttgcaatctaccaaagagttactccttgaatatgttcaaggattttgtacccatgtgtgttttctctgagactaatcaaggaaaactctcatgcgaaggaaaagtcgagcataaattcgacatggaacctcacaaggataacttattaaatacgcgaagttatgccgtgaaagaacacaaaagtcgatggttaaaactagaaaagtgcaggtacttgataatgaccacggaatgagcatgagacccatgcctggcatggttggtctgatatcttctagttccaaggagaagaggaagccaacgccaaccaaaccatccgatgtcaaaaggacacgtagggatcgccgggaactggaaaacattatattcaagcttttcgaaaagcagcctaactgggcactgaaggctctagtgcaagagactgaccagccagagcaattcctcaaggagatattgaacgacctctgtatgtacaacaagcgagggccgaaccagggcacgcacgagctcaagcccgagtacaagaagtcgtcagaggacgccgccggtgctgctccgtgaagatgattcgcgtatccgactgctgttgtataaccgagtacctgttggctttgatgcgcggaacgatgagttggctgtctggagcctcagatcatgcctgggctgcatttgcttgctttttctttattaagaggcattgttgtaactgtatgggtataagatgatacatatacaacacatgtcacagaagggaaatggaaatactgataaaccacatgaaagatcgtttgatttccagggtagctgcaagaatcatgccgagg

SEQ ID NO: 4489 - DNA, 869 bp, Triticum aestivum
atggacgggcacgtcggccagttcttccagtcggtcagctcgatcttccgcgggagcgacaccctccccgtctgcgaccgcgacatcatcgccggttgtgagacagaggttgctgaggctgcaaatgaagaacagaagaacgacagcctcatgaggctgtcatgggcgcttgttcactctaggcagcccgaggatgtcaaccgtggcattggaatgcttgaagcttctttcggcaagtctaacagtccgctacaaacaagggagaagctctatttgttggccgttggacactacagaaatggggattacacaagaagccgtgagcttctggaaagatgcttagaggttcaacctgactggaggcaagctcttactttggaaaggctccttgaagagaaaaccaaaagagatgttatgattggcatggccattgtgaccggcgcctttggacttgtggggcttgttgctggtggaatcatagctgctgcttcatcgtccaggaagaaatgaggctccggtatgcggtgaataagatgattagatgagcaagaacttgatgtgaagttgcgtaatcttaccttggcactcttgcgaccatgcatgtgcgcacttatccttgtcctgtcctgtttccatgttggaccaaccttaatcgcactattagtaaatacgacatttcaactgtcggatcgaagaatgtatgttaagctaatgctagatcatagactgttgcattggttcatatcattctgataatccatcttacaagcataagaggagctgtatcttatgccaacgtaagatcgatgttgacgcgaaaatttcagaagagcataagatggaaggaagagaattatttttggttttaa

SEQ ID NO: 4490 - DNA, 675 bp, Triticum aestivum
gtgatttccaagagctttgagcggatccaccgaagcaacttggtcgggatggggatcatcccgctgtgcttcaaagccggggaggatgccgactcactcggccttactggacatgagcgctacaccatcaaccttcccaccgatgtcagcgagatccgccctggccaggatgtgaccatcaccacggacaacgataaatccttcacttgcatacttcgctttgacacagaggtggagttggcctactacaaccatggaggcatcctgccctatgtaatccgcaacatggcagcagctcagaactaggcgaaggcgcacacaccctttccgccaacgatggcggcatgccaatcttgttagtgccaccatcaacgtcgagcgttcactcttgattttgtggccttatgaataaaccgaaaataaagccggcatttccatacctggcgtgggcgcaagttgatttgtgggtgtttggttgtggttatgaaaccgtgtggtcattctgaagagacatccaattgtggaggattaaaatcgtagagtctggtgtacattgctttgtgccaaaaacatatataaactgatagcaatctggagttcttttttaacctttacctcaccaatctactgcctgccttacatactgtagtgacctttatattactaaggtgccac

SEQ ID NO: 4491 - DNA, 834 bp, Triticum aestivum
ctgttttcgatgcggccacgaaatacaaatctgaaggtcatggatacgatcattcttgctggcgccgagtatgggagtggcagctctcgtgattgggctgtccaaggggccgatgcttcttggtgtgaaagcggtgattgccaagagctttgagcggatccaccgaagcaacttggtcgggatggggatcatcccaatgtgcttcaaagccggcgaggatgccgactcactcggccttactggacacgagcgctacaccatcaaccttcccaccgatgtcagcgagatccgtcctggccaggatgtgaccatcaccacggacgacgataaatccttcacttgcatacttcgctttgacacagaggtggagttggcctactacaaccatggaggcatcctgccctatgtaatccgcaacatggcaggagctcagaactaaggcgaaagaacgcgggcgtgcacacaaacacacaccctttcgaccacgacggtggcacggcagtcttgttagtgccatcgtcgacgtcgagggttggtttagaatttcgccgggcttcgttcgctttacaaataaaccggaaaataaagccccgtaggagacagagaaagggcattttcgtacccgatgctcatcttttggctgtgattatgaaaccatcattcggaacaaatcttcagttgtggattaaatcgttctgtagtgatctttcgggctgtttattttttcttttcctctttgaatgtgctgtagtggccttattacatcatcgtatttgtcttgcagaacaattttattttatatgtatgtatactaattttatagacatagaatac

SEQ ID NO: 4492 - DNA, 796 bp, Triticum aestivum
tacaagtctgaaggtcatgatactatcattcttgctggcgccgagtatgggagcggcagctctcgtgattgggctgccaaggggccgatgcttctcggtgtgaaagcggtgatttccaagagctttgagcggatccaccgaagcaacttggtcgggatggggatcatccctctgtgcttcaaagccggcgaggatgccgactcactcggccttactggacatgagcgctacaccatcaaccttcccaccgatgtcagcgagatccgtcctggccaggatgtgaccatcaccacggacaacgacaagtccttcacttgcatacttcgctttgacacagaggtggagttggcctactacaaccatggaggcatcctgccctatgtaatccgcaacatggcagcagctcagaactaggcgaaggcgcacacaccctttccgccaatgatggcggcatgccagtcttgttagtgccaccaccaacgtcgagcggtcactcttgattttgtggccttatgaataaaccgataataatgccggcatttccatacctgggcgtgggcgcaggtcgatttctccggtgtttggttgtgtttatgaaaccgtgtggtcattttggacagatattcaattgtggaggattaaatcgtagagctcggtgtacattgctttgtgctacaaacatatataaactgatagcaatctggagttcttttctgaacctttacctcaccaatcgactgcctggctttacatacctgtagtggcctttatatatttactaaggttgcccactgct

SEQ ID NO: 4493 - DNA, 852 bp, Triticum aestivum
gctggtgatggcgcttctgtcatcataaagtctctactggacagagctacagagcttcttactgatcaacatgtggcctctgcttacagcatgcagaaccgaactctatggcaggcatcatttgatgccttctttgggctgcttatggggtattgcatgagtaaatttgatactgtggttcatacagtgcaaattcaacctgctgctgcagctgtgataagcagggaaacaccagtggagctgttgcgtgccagccttcctcacacaaatgagtatcagcgcaagcagttgctcagtttcgctcagcgcactgtgcctgtcaacagctctagttctcatgggtctggtaatgtgccgatggcatcagaatatgtccagagctgaaatagaagaacagagctgcttttcataatctatatacttgatatggttcttgcgagtggtgggaagaacatagatattgtggtgacgacaaagaatgatggtctcggtcaaatatacaaaggatgatcttcggccactttaggaagctgaaattgatgaattatgttgctgagactgaggtagagaaggctgctacaatggatggtgcccgaggggaacatgatcgctggatgtgttaagccttcattctgtcagccaaaacttttagggtgctttctgttgcattccattgcacgatctaaacttgttttagcgctttagttttgttattcgtatatgaattttgttgttttctcgatggcctgtaagctgttcttctgttcttccggcgcttgaattggcacaaattattactgcaagccttgcgtatcagcctgacatttgaacatgctgacaaatcaacatttc

SEQ ID NO: 4494 - DNA, 1092 bp, Triticum aestivum
cttttttctcccagatggacgaccaacttctagatgccatatgtgtgcgtcttgtatcatcactgtgtacaaagggcacatacattgtccgtgagggtgatcccgtggctgagatgcttttcatcatccgtgggaaactggagagctccacaacaaatggtggccgcacaggcttcttcaattcaactacactgaaagctggtgatttctgcggcgaggaacttcttggatgggctcttgtcccgaagcctaccgctagtttgccatcatccactcgcacagtgaaggcactcatagaagtggaggccttttcactccaggccgaggatctcaagtttgtggccagccaatttaggcggttgcacagcaagaagttgcagcacactttccgatactactcacaccattggagaacatggggcgcgtgcttcatccaagctgcgtggcggcggtacaggaggaggaagatggcgaaggacctgagtatgagggagtcattcaattccgtgagatcagaagactcggatggtttagatgaccctccaacccagaagaatatctctctaagaatgatggccgggaaagtcatggctgggaacaggaaagggcttcaggccataaaagagttgccgacactgaagaagccggacgagccagatttctcggtcgaaccctacgagtaaggtataatgttctacccagaacggtcactgatcctctagctctgctaccaagttagtctgtctttgctgcattgaggagactgtaatccggttggaatttggattcgcagaaccggtcgttgatgcaagaattctaattaacactgaatcccaaatgcgcggtgggagaccttacgaagagatgctaaacagattatactacacatagatattctagtcataattacgttgtacattcagatgtttatctgtgtttgtaaaattcttggtgcctcagcacagggcgctgctacactgactgtctgagcttcaaagaaatcctgacattgaagccatagtatggagtacctttttgcagtctttttagtacgaggtttgctacatattttgttaaaagtagactgtaaat

SEQ ID NO: 4495 - DNA, 784 bp, Triticum aestivum
ggagagaacacacgcaacggatgcacgaggaggaggcaaggtaagcctgctgcctgctgccgccccgtccctcctcgccggccggccgccacaggtttcaagatgtcaacctgcacgtttgcagcttcctgtgccctcttgggcaatgctcgaacaaccgatgccccccagaaagcggtcaagagccgcctgagcttcctcggccgaggcgcgccgcagctgcggagcctgaggtcctccttcccctccaagaagctggacgtctccgcggcggccacgtacaaggtgaagctggtgaccccggaaggggacgagcacgagtttgaggcgccggacgacgcctacatcctggactcggcggagacggcgggggtggagctgccctactcgtgccgggcgggggcgtgctcgacctgcgcgggcaagatcgaggctggcgcggtggaccagtcggacgggtcgttcctggacgacgcgcagcaggaggagggctacgtgctgacatgcgtggcctaccccaagtcggactgcgtcatccacacccacaaggagggcgacctgtattaggagggctctcatctctggtgcccccagttggttgtgtgttgagtagaacaaggtctgtctgtaaaacaaaccttggtggttgtttatcccgtgcctgcctgtgtgcgtgctttggtcgttattagtcggaggtggttaagattgttgggtgaagaggccacccatggagaaggcgaataaaatctgactgtgactgatggcatcataaagcagtttg

SEQ ID NO: 4496 - DNA, 663 bp, Triticum aestivum
  N_region (485)..(504): n = any nucleotide
cgcctccagcatcctggagaacatagcctacggcaaggaagcgcgacggaggaggaggtggtcgagcgccaagacggccaacgtgcacgcgttcgtgagccagctccccgacgggtaccggacggcggtgggcgagcgcggcgtgcagctgtcgggcgggcagaagcagcgcatcgccatcgccagggcggtgctcaaggacccggccatcctgctgctggacgaggcgacgagcgcgctggacgccgagtcggagagcgtgctgcaggaggcgctggagcggctgatgaaggggcggacgacggtgctggtggcgcaccggctgtcaacgatccgcggcgtggaccgcatcgccgtggtgcaggacgggcgcatcatcgagcacggcgggcactcggagctcgtggcgcggcccgagggcgcctactcccggctgctgcagctgcagaaccaccgcaactgatggaaggacctgatcgatgccnnnnnnnnnnnnnnnnnnnngggcttgatttttgtgggtggtggtggtctggtctagtgggtgtagatactagggcgaccgtgtgttactggtctcttttctttgtgtttgaactgcaaaccttgtgatctgatcttgatcttgatctgtatcttctccgtgatgaaatgcatgatgcg

SEQ ID NO: 4497 - DNA, 582 bp, Triticum aestivum
ccaagacggccaacgtgcacgcgttcgtgagccagctccccgacgggtaccggacggcggtgggcgagcgcggcgtgcagctgtcgggcgggcagaagcagcgcatcgccatcgccagggcggtgctcaaggacccggccatcctgctcctggacgaggcgaccagcgcgctggacgccgagtcggagagcgtgctgcaggaggcgctggagcagctgatgaaggggcggacgacggtgctggtggcgcaccggctgtcgacgatccgcggcgtggaccgcatcgccgtggtgcaggacgggcgcgtcgtggagcatggcgggcactcggagctcgtggcgcggcccgagggcgcctactcccggctgctgcagctgcagaaccaccgcaactgatggagggacctgatcgatgccatgggtggatggatgggggcttgatttttgtgggtggtggtggtctggtctagtgggtgtagatactagggcgaccgtgcgttactggtctcttttctttgtgcttgaactgcaaaccttgtgatctgatcttgatctgtatccttctccgtgatgaaaatgcatg

SEQ ID NO: 4498 - DNA, 503 bp, Triticum aestivum
tgtgcccgcagcaggagttgctggagcacgaggccgtaggggtgttcctcacgcactctggctggaactcgtcactggagggcatctgcggcggcgtgccgatggtgtgctggcccttcttcgcggagcagcagaccaactgccgtttcaagtgtacggagtggggcatcggtatggagattggggatgacgtgaggaggaccgaggtggaggccatgatacgggaggccatggagggggagcaggggcgtgagatgcgacgacgcgtgctggagcttcgccagagtgctgtggcctctgcacggcatggcggaaggtccatgcgcaatgttgataggctcatcaaggaggtgcttctggcttgaaacaagcaaattaagctggtaaaaataaatggtttggcgagtctgaagcgtttattaagacgtaaccaactcctctccatttgaaagcttaagtcatgttttgagtgatagtttacatggattaccaagatttgctac

SEQ ID NO: 4499 - DNA, 581 bp, Triticum aestivum
cttgtcaaggcgacttcaaggccgctacttctgccgggagttctatgcggcaactgaggggcggagcattgttgtcgactggttgcccgcagcaggaggtgctggagcacgagtccgtaggggtgttcctcacgcactctggctggtactcgtcgctggagggcatctgcggcggcggtgccgatgtgtgctggcccttcttcgcggagcagcagaccaactgccgtttcaagtgtacggagtggggcatcgggatggagattggggacgacgtgaggaggaccgaggtggaggccatgatacgggaggccatggagggggagcaggggcgggagatgcggcgacgcgtgttggagcttcaccagagcgctgtggcctcctcacggcgtgacggaaggtccatgcgcaatgttgataggctcatcaaggaggtgcttctggcttaacaagcaaattaggctggtaaataaatgtttggcgagtctaaagcgtctattaagaagtaaccatccctctccattttaaagcttcagtcatgttttgggtgataacttacatggattaccaagatttgttacaaa

SEQ ID NO: 4500 - DNA, 755 bp, Triticum aestivum
aagattggaaagttgcacgagcaattgctattatgaccacccattccaaaggcaaatgattcccactcgattcagattattttaccacaaagcactttgggcgcaaggtcagacatgtatgtctttctggttgctcgtacactcacaatgtcgcgccaaaagggaagttcattgcatttgtgtctgccgaagcggagactgataatccacagtccgaactaaagcctggaattgatctacttggtccagtagatgaattgtttttcgatatgtatgacagatatgaaccagtcaatgaaccttctcttgataattgctttgtctcatcgagttatgatgccactactcactttgagacgactgtgacagatgttcttaatatgtacacactgattactggaaagactgttgatcttagcgttgatctcagtgctgccagcgctgcagaagagtactagatctcaaacccagaattttcttcaagacatacttcctggaggacgaggaacaccaccggaatcctactgtgtgatggtcacgtgtgacatcagctgcgtactgcgtagggttccaggtccacgcctgctaccagcactatgcgaaattattatctttggaatggtgctgggttccttcgttaacttccatattgatccactgggttgtaaacgttattctatcataacgatggctttgacatgttaatgttcgtcttgtcgatgtattctacagttatacatacttggtgtcttgga

SEQ ID NO: 4501 - DNA, 919 bp, Triticum aestivum
gttagataagctagagtgcaaggttgaatttgatatggaggggaaagtgtgtggtgttacgtcagaaggtgaaactgctaagtgcaagaaggttgtctgtgatccttcttacttggccaacaaggtaaggaagattggaaaagttgcacgagcaattgctattatgagccacccaattccaaatgcaaatgattcccactcgattcagattattttaccacaaaatcaacttgggcgcaagtcagacatgtattcttctgttgctcgtacacccacaatgtcgcaccaaaagggaagttcattgcatttgtgtctgcagaagcagagactgataacccacagtccgaactaaagcctggaatcgatctacttggtccagtagatgaattgttttttgatatgtatgacagatatgaacccgtcaatgaaccttctcttgataattgctttgtctcatcgagttatgatgccactactcactttgagacaactgtcacagatgttcttaatatgtacacactgattactggaaagactgttgatcttagcgttgatctcagcgctgccagcgctgcagaagagtactagatctcatcaaaccaagcattttcttcaagactatactaaatggaggaacaccaccggaatcctactgcaggatggtcatgtgtgacatgagctgcatactgcgtagggggttcaggtgcgtagggggttcaggtccacgcctgccagcagcactatgcgaaattattatatgtggaatggtgctgatttccttcgttaacttccatattgatccactgggttgtaaacgttattctatcgtaacgatggctttagcatgttcatgttcgtcttgttgatgtattctacagttatacatattggtgtcttggatgtattttccttccgagta

SEQ ID NO: 4502 - DNA, 1154 bp, Triticum aestivum
gccatcaagtcatttttctcgactcctcagaacaacttcaggatttttgtgaatggctccttaggttttggtggcatgggaggtggtgctgataagggtccttgctaatgaaacagagaagtgtcttgaagatctgaggaaggttagtgggctacaactatctgactttattgagctcctgtcagaggcaatatctaaatctggagtattggataaacttttggccactcaaaaactggatgatcatgacatcgaaggggcaattcatctgtattacgacatcatctctcagccttgtttggtctgcaaaaatataactgatgctgagctattgcacaagtactctgtgttgcattctcttcctttggacaagagctgtaagatagtcagggactttcttatttctgctaccgcgaaggactgtagcctcatgatgtgctttcggccacgagagtgtgagagaacagatcctgagtatgattcagtgtttcttcagtcagtgaaccgaacctatgattacaaggcttactttgttgatctggatgtgaagcctctggataagatgacacattattttaaattggaccagaagatcgtcatttctacactaagagcggggaggtcgggcgagtcccttgtgattctcagaagggggttggcaccagtgatgacacaacggttcagccacaacattgagttgctccttcaacttgaagcctctggaccggaaagggcacatgccattggtcctgttgtttcgccttgtccctgttgttgtaaccttgtaagtacagctccattgtcgaggagctcttcccttccatcgggaaaaaaagatgccgcagagcggccactgctgtttgttgtcgctgttactgtagcttatgagtggtacatcatgtatacctaccgccaccaggtggctcgtcgcggcagaaaacacaccaggaattcgatacacagacaccaagatgcatgaacagacttttttacagtggcaaccacatgttgccgtatctgcagcagagatgggagcccaggtttgccttgtaggctacggtgtagccatttcaccggttccctctccacctggtaaccggcgtatgtaccaatgtactccctccgtccggaaacacttgttatcaaatgaataa

SEQ ID NO: 4503 - DNA, 623 bp, Triticum aestivum
gtccggcgtatcctctggtctgggctagggttcctgatcacgcaggtcgggctcttcttcaggctcaccttctgggagttctcgtgggacgtcatggagcccatcacattcttcacaactgcgacgggcctggtcgtcgggtacgcctacttcctcatcacatcaagggacccgacataccgggacttcatggagaggatgttccagtcccggcagaggaagttgatccagaggcagaagttcaacctggacaggtacctggagctccagaggtgctgcaaagatcctctggagaagatctgcggcaccagccatttctccaacgccgacatcgcgcatctgcacgagctgtctgtccacaagtgacggacggccctcccgtcgctctaaaacactaatctacagtgcccccttttcatctttgattctcgtgggatgatgatgaagaagaaagtattaacaaaccggatgtttcttgcgcttgcgaggtggacctttggcaaaacctttttcgtggtctctctcctttgcaaatgtctaggccagcaaacccagtatagctatgtctctctcttttgtacattgctgaagcagaagcacttgatcctgatgcttgtactgct

SEQ ID NO: 4504 - DNA, 1205 bp, Triticum aestivum
  N_region (136)..(136): n = any nucleotide
tgcgccgccgccaaggacgtcttcctcagccagcccaacctcctcgagctcgaggcccccatcaaagtctgcggggacatccatggccaatattctgatcttcttcgattatttgagtatggtggtttcccaccgngaggcgaactatttgtttctgggtgactatgttgatcgtggcaaacagagtattgaaacgatatgccttctgcttgcttacaagattaagtacccggagaacttctttctccttaggggaaaccatgaatgtgcctctatcaacagaatctatggattctttgatgaatgcaagaggaggttcaatgttcgtctctggaaggtttttactgactgttttaactgccttcctgtggctgcacttattgatgacaagatcctgtgcatgcatgggggtttatcacctgatttaaagaacatggaccagatacgtaacattgcccgtcctgtggatattccggaccatggtctcctctgtgatctgctatggtcagaccctgataaagatgttgatggctggggtgagaatgacaggggcgtgtcatacactttcggagctgataaggttgcagagttccttgagaaacatgatctagatttggtctgcagggctcaccaagtgttggaggatggatatgaattctttgcaaagcgtcagctcgtaaccatattctctgcacccaactattgtggcgagtttgacaatgctggtgccatgatgagcatagatgattcactaacatgctcattccagatccttaagccttctgataagaaagggaaagctggaaccggcaactcaaaacctggaacaccgcctaggaagataaagattaatattatttaggcagacccttcaggtatgaaatgagttattgtgatggagcacacccccaaaacttgttatgaaggtgcgccgaacaacctgttgaaaacgtcaacctgcatgctgttgttttttcgtggtctgatgcagatctgtcctgccattctggaaagatcagagcaggaaacataactgggaattttgtgtggattttttattccttttattaactctgctatgcgtggcaaaatgtttaagcacgggaggcatcaggaacctcatcctgtggtggagattgccaatgctgaatgtagattctgttatgttatgtacgctgttttatctgtaaagctcgcctctgcaa

SEQ ID NO: 4505 - DNA, 657 bp, Triticum aestivum
ggagttttgcaggcaagtggacaaagattgtgagttactagagcaggagaggatcatggatatagtctttttggttggcattcacttcaaagatcgatttaacggcaatgctgacaacggtggtgctgaagattctgagcaaaataagaaagcgaaactggggatcgccatgcagtcgagggtggagaacgttgtgcggaaccccgagagcgagtcgcctctcatcggtgatcccacgggagaatttcgggaggtggtcctcttcttcggcatcatcgacatcctgcaagactacgacatcagcaagaagctggagcacgcctacaaatctcagctgtatgatcccaactccatatcggccgtcgaccccaagcagtactgcaagaggttcagggacttcatctacagggccttcactgaagacgtgcagtgatcacttcttggcacctccccgccgaagctggctgaaggaacatgattgttggattgttctttcggtcggagatcaatggcacgacaaattttggttctctggggattgttcatagaccatgtacatttttttgctaatattcctcctttccttaactgggtaactaggtctagtgtgtaacgcgcccatgctgattggcctgaaaagcatgtagaaccagagac

SEQ ID NO: 4506 - DNA, 524 bp, Triticum aestivum
attctgagcaaaataagaaagcgaaactggggatcgccatgcagtcgagggtggagaatgttgtgcggagccccgagagtgagtcgccgctcatcggtgaacccacgggagaatttcgggaggtggtcctcttcttcggcatcatcgacatcctgcaagactacgacatcagcaagaagctggagcacgcctacaaatctcagctgtatgatcccaactccatatcggccgtcgaccccaagcagtactgcaagaggttcagggacttcatctacagggccttcactgaggacgtgcagtgatcacttcttggcacctccccaccgaagactggctgaaggaacaggattgttggatcgttctttctgtccgagatcgatggcgcgacgaattttggttctctggggattgttcatagactatgtacatttttttgctaatattcctcctttccttaactgggtaattaggtctagtgtgtaacgcgcccatgctgatggcctgaaaaggatgtagaacagaga

SEQ ID NO: 4507 - DNA, 570 bp, Triticum aestivum
gccccttccaggaccagaaagaagccccacgatcgtccggtccagctactagttccgcgacgcgatcgtccggtttatttatctgtatctggttaatcgcagcagtttggagctgtcagattcgagtagctagcttagcatctcgagcgagaagaaggatcgaggagatgagcggcggcggcggaggagcggcggcgacgcaggggcagcaggatctgcagctgccgccggggttccggttccacccgacggacgaggagctggtgatgcactacctctgccggcgctgcgccggcctgcccatctccgtgcccatcatcgccgaggtcgacctctacaagttcgacccatggcagctcccaagaatggcgctgtacggcgagaaggagtggtacttcttctccccgcgcgaccgcaagtacccgaacgggtcgcggccgaaccggtcggccggcacgggctactggaaggccaccggcgccgacaagccggtgggcacgcccaagccgatggccatcaagaaggcgctcgtcttctacgccggcaaggccccaagggcgaaaagaccag

SEQ ID NO: 4508 - DNA, 726 bp, Triticum aestivum
ctaatgtgaaccccgaccgggaaggcccgacgactgctcgagaattgctccagaagcacggcgaggtcgtgtacagctccggcggggccagcagcgcgtctctggccagcgagccgacgaggacgccgagtgcctgtcactggctgtttctctggctaaagttgcaagcgaggtccaaggccgccgacattcgtgtgctgttcgtgaagccgattgtctactggaccgagttcttcatcatcctcaccgccttctcgaatgcacagattgaggccatcagttccaaaatgagagacatcggggagcagcagttcagcagagttgcgtctggtgatacaaaacccaattcatggaccttgctggactttggcgatgtcgtcgtgcatatatttcttcccccgcagcgggagttctacaacctggaagagttctacggcaacgccactcccatcgaactccctttcgagacccagctgcagtaactaccgctcgaatcttggcattggagccaaacgaggacggtcactcaaagacccgcaggtagatagatagcttggtcgcacagctggacaggacagtgatgccgggtgaccactctcctgaagtatgcgaaattggcgccgtcatgcaaacattcttgtaatctgttgttataccatgtgtatcattgtagcaactaagcaccattgaacaatgttaacagcaagaggaatagaatccagaaag

SEQ ID NO: 4509 - DNA, 731 bp, Triticum aestivum
cgggacaggggagggcgcggacgagctgctcgaggaatgctccagaagcaacggtgaggtcgtgtacagctccggcggggccagcagcgcggccctggccagcgaggccgacgaggacgccgagtgcctgtcactggccgtttctctggctaaagttgcaagcgaggtcaaggccgccgacatccgtgtgctgttcgtgaagccgattgtctactggaccgagttcttcatcatcctcaccgccttctcgaatgcgcagattgaggccatcagttccaaaatgagagacataggtgagcagaagttcagcagagttgcgtctggtgatacaaaacccaattcatggaccttgctggactttggcgatgtcgtcgtgcatatattccttcccccgcagcgggaattctacaacctggaggagttctacggcaacgccacccccatcgaactccctttcgagacccagctgcagtaatcgccgctcgaatcttggcattggagccaaacgaggacgttcactcaaagacctgcagatagatagatagcttggtcgcacagctggacagtgatgccgagtgactactctcctgaagtatgtgaaattggcgccatcatgcaaacattcttgtaatctgttgttataccatgtgtatcattgtagcaactacgcagtacgcactattgaacaatgtttaacagcaagaggaatagagttcagcaaagattggcgg

SEQ ID NO: 4510 - DNA, 562 bp, Triticum aestivum
tgaagtcagggcagatcacacaggaatatgatcagcacttggggcggtggaacactattacctttgtagataataataggaggtttgtgacatctagcgatgacaagtctcttcgtgtgtgggagtttggcatccctgtagttattaagtatatcagtgagccgcacatgcactccatgccgtctattgcagtacacccaactctaactggctggcagcacagagcttggacaatcagatactgatatacagcacgaaggaaaggtttcaacttaataagaagaaaaggtttgcaggccacattgtggcaggttatgcttgtcaggtgagcttctctcctgatgggaggtttgtgatgtcaggagacggtgaaggtagttgctggttctgggactggaaaagctgcaggagattcaagacattgaagtgccacaatggagtttgcattggatgtgagtggcatccgttggagactagcaaggttgcaacgtgtggatgggatggtgtcataaaatactgggattaaagatttggcaatttagacagaaacgttgctcgagat

SEQ ID NO: 4511 - DNA, 639 bp, Triticum aestivum
aatgggctgatattgttaacgcccatgtaattcctgggcctggaattgttgatggcttgaagcttaagggtttaccaaaagggagagggcttcttctgcttgctgaaatgagctcggctggcaaccttgctcaaggagattacactgcagcagctgtaaagattgccgagcaacattctgattttgtgattggatttatatcagtaaatcccgcatcttggtctgtggcaccatcaagcccagcgtttatccatgccacccctggagtgcagatggtttctggaggagatgctcttgggcaacagtacacaactcctttttctgtgataaacgacagaggcagcgacataatcattgtgggccgcgggatcatcaaggcgagcgaccccgagcagacggcgagggagtaccgcgtccaagggtggcaggcgtacctgtccagcttgtgaggaaggctgctgctcaaacgcaaacgcctctctcagtgtaaacccaaacgaaatgcgctggcgttcgagccatggatcgatcaatgtaataagagtgcctcctgtcggcgctgagtgatttcccccttgtgcctggtgtcggcggcacgcgtcgttttggggaaataacttcgaaatcgcggtaatggaa

SEQ ID NO: 4512 - DNA, 707 bp, Triticum aestivum
ggacattggtaacacagtaactatgcaagatgaaggtaggaatattccgcatattagaatgggctgatattgttaatgcccatgtaattcctgggcctggaattgttgatggtttgaagcttaagggtttaccgaaaggaagagggctacttttgcttgctgaaatgagctcagctggcaaccttgctcaaggagattacactgcagcagctgtaaagattgctgagcaacattctgattttgtgattggatttatatcagtaaatcccgcatcgtggtctgtggcaccatcaagcccagcgtttatccatgccacccctggagtgcagatggtttctggaggagatgctcttgggcaacagtacaccactccttattctgtgataaacgacagaggcagcgatataatcattgtggggcgcgggatcatcaaggcgagcgaccccgagcagacggccagggagtaccgcatccaagggtggcaggcgtacctgtcgagcttgtgaggaggaagctgctgcccaaacgcctctctcagtgtaaaacccaaacgaaatgagctggcgttcgtgccatcgaccgatcaatgtaataagagcgcctcctgtcggcgccgagtgatcttcccccttgtgcctggtgtcgcgtcgttttggggaaataatttcgacattgcggtaatagaaaccagaacgttccaatgagca

SEQ ID NO: 4513 - DNA, 747 bp, Triticum aestivum
gctcgattgctgagaagcgcaactttttgatcttcgaagaccgcaagtttgctagcattggcaacacagtaactatgcaatatgaaggaggaatattccgcatattggaatgggctgatattgttaacgcccatgtaattcctgggcctggaattgttgatggcttgaagcttaagggtttaccgaaaggaagagggctacttttactcgctgaaatgagctcagctggtaaccttgctcaaggagattacactgcagcagctgtaaagattgccgagcaacattctgattttgtgattggatttatatcagtaaatcccgcatcgtggtctgtggcaccatcaagcccagcgttcatccatgccacccctggagtgcagatggtttctggaggagatgctcttgggcaacagtacaccactccttattctgtgataaacgacagaggcagcgatataatcattgtggggcgcgggatcatcaaggcgagcgaccccgagcagacggccagggagtaccgcgtccaagggtggcaggcgtacctgtccagcttgtgaggaaagctgctgctcagacgcctctctcggtgtaaaacccaaatgaaatgcgctggtgttcgtgccatcgaccgaccgatcaatgtaataagagcgcctcctgtcggcgccgagtgatttccccccttgtgcctggtgtcggcggcacgcgtcgtcttgggggaaataacttcgaaatcgcggtaataga

SEQ ID NO: 4514 - DNA, 680 bp, Triticum aestivum
caggaggtcggcgaccagtgggcgctgcgcggtgtcacattacgcccctggcatcctccactggtggatggaccagagctggctgcccacctccaccgtcgtggccggcaccacgccgctccccaacaagcgcgacgccgagatccgcgccaagctcaaggccgacggcacgttccagcagaagatggaactggcgacacagcagggcatccacgagtcgtactaccgcgacatgatggtgatgttcggcaagtgggagttcgacccgatgagcctgccgaagccgccttgccccgtccacatctggcagggcgacgaggacggtctggtgcccgtggtgctgcagaggcacatcgccagccggctcagctgggtgaactaccatgagctccccgcgaccgggcatttcctgtcgccggtccctgggctaggtgacaccgttcttcagacccttttcggcaatgctaagcaatgatcaggaacagcaatagtagctctgaacatactacgttgctgaagtatagggttcttccgatgcattgttttattctaaggtggtcaggtaatcgctgctgattagcgacgatgttataggtgaaatggtggtgtaacatcaagtgttttttgtggcggaaattgcgcggccaggatgtgcgcgcaaaatatgtaattgaaccttg

SEQ ID NO: 4515 - DNA, 718 bp, Triticum aestivum
gggcgctgcggtgtgtcacattacgtcccctggcatcctccactggtggatggatcagactgctgcccacctccaccgtcgtggccggcaccacgccgctccccaataagcgcgacgccgagatccgcgccaagctcaaggccgatggcacattccagcagaagatggaactggcaacacagcagggcatccacgagtcgtactaccgcgacatgatggtgatgttcggcaagtgggagttcgacccgatgagcctgccgaagccgccttgccccgtgcacatctggcagggcgacgaggacggcctggtgcccgtggtgctgcagaggcacatcgtcagccggctcagctgggtgaactaccatgagctccccgcgaccgggcatttcctgtcgccggtccccgggctaggtgacaccgttctccagacccttttcggcaatgctaagcaatgatcagcagcaacaacagcaacagcagctctgaacatactacgttgctgaagtatagcgttcttcgggtgcattgttttattctaaggtggtcaggttatcgctgattagcgacgatgttataggtgaaatggtggtgtaacatcaagtgttttttgtggtggaaatcgcgcagccaggatgtgcgcgcaaaatatgtaattgaaccttggaaacgagaaagtagtggaactactataccatgatgatcttaccttttactccgt

SEQ ID NO: 4516 - DNA, 693 bp, Triticum aestivum
catcgtggacaccgtcatggcacgctgcgacgagatctttcaggctcaagggcgccgcggccaaggccgacgccttccgcgtcctgtcggggacgtggacgacccccgtcgagaggtgcttcctctggctcggcggcttccggccatccgagcttctcaagctgctcgcgagcaggctggagcccctcaccgagaagcagctcgacagtatcgatgtcctgcggcgttcctccctgcaagccgaagaagcactctcgagagagatggaagcgctgcgacagtcggtcaccgaaaccatcgcggcggcaggatcgtcgtcccagagctgctccgacgatgattgcacgggccaaatggcggcggcggtgggaaagcttggcgccatggaaggcctcctgcggcaggctgatgatctgcgactgcggattctcgaggaaacgcggcgggtactgaccatccgtcagtgcgcacgagcggtgctcgtggtcagcgactacttctcccggatgcgcgccctgagttctctctggatcgcacgtccgacgaccggagtgaactgagtttccacagtcggacatattattattattcgagaaaagcaaaagagaacgtagtactatggactgcatatgaactgaaataattagtgaacaatctctatctctatctttatccctactacttccacatggg

SEQ ID NO: 4517 - DNA, 533 bp, Triticum aestivum
  N_region (183)..(183): n = any nucleotide
gagatccccacgccctatatgcaagtcgtgatttgggcttatcaaaggttaaatgccagacactaatctccgtggggtgcgagggacacttccctggatggctcctgagctgttaaatggcacgcagtaaccttgtttctgaaaaggtcgacgtcttctcattcggaatcgtgatgtgggacntgcttaccggtgaagagccttatgctgacctgcattatggcgccatcataggtgggatcgtgaacgacaccctacggccgctggtgcccgagtcgtgcgacccccagtggagatcgctgatggagcagtgctggtcagccgagccgatggagcggccgagcttcacggaggtcgtcaagaggctacgggctatggcgacctcccccaccaagacgctgccgcagaagtagactgcccttagctccgtacatgagcaagggaaaatatagagaaggacgcggcgacgctgctcacaataggatagagctggtgggggtttgcctgacacttcatgtggtgcttttagacac

SEQ ID NO: 4518 - DNA, 711 bp, Triticum aestivum
acttcgacttgaagagtgataatctgctcgtcattctaagagatccccaccgccctatatgccaagtcggtgatttgggcttatcacaaggttaaatgccagaccctgatctctggtggagtgccgaggaacacttccctggatggctcctgagctgttaaatggcagcagtaaccttgtttctgaaaaggttgacgtcttctcattcggaatcgtgatgtgggagctgcttaccggtgaagagccttacgccgacctgcattacggcgccatcataggtgggatcgtgaacaacaccctgcggcctctggtgcccgagtcgtgcgacccccagtggagatcgctgatggagcagtgctggtcggccgagccgacggagcggccgagcttcacggaggtcgtcaagaggctacgggccatggcgacctcccccaccaaggcgccgccgcagaagtagactgcccttagctctgtacatgagcaagggaaaatatagaggaggccgcggcaatgctgctcacaataggatagagctggtggggtttgcctgacgcttcatgtggtgcttttagacactgatgatgatccccgcatgaaaatgtaagagcatgtacaggaaggtgccgtggcatggttggtgaatgtgttatgtaccggctcctggggtgttccgggacttgtttcctgcgcgtgatcgctgtgcataagcct

SEQ ID NO: 4519 - DNA, 673 bp, Triticum aestivum
tatctctgtgggtcgaggacacttcccttggatggctcctgagctgttaaatgccagcagtaaccttgtttctgaaaaggtcgatgtcttctcatttcggaatagtgatgtgggaacttcttactggtgaagagccttatgctgacttgcattacggcgccatcataggtgggatcgtgaacaacaccctgcggcctctggtgcccgagtcatgcgacccccagtggagatcgctgatggagcagtgctggtcggccgagccgacggagcggccgagcttcacggaggtcgtcaagaggctacgggccatggcgacctcccccaccaaggcgccgccgcagaagtaggctgcccttaggctctgtacatgagtaaggtgatgaaatatggagaagaacgcggggacgctgcttacataggacagtggagctggtggggtttgcctgacgcttcatgtggtgctgttagaaactgatgatgatgatgaaatgtaagagcatgtacaggaaggtgccgtggcaagggttgctgaatgtgttacgtaccggctcctgggtgttccggaacttgtttcctgcgcgtgatcgctgtgcagaagccttgctggaacaaatgcagaatgcagtctgtggcctgcgtcctcttgctagcttggatgcgtgagcttgcctgt

SEQ ID NO: 4520 - DNA, 612 bp, Triticum aestivum
agctcctgggcctatgaatacaaggacggccaccgagtaaaaaaatacagaggtatgggctccctcgaagccatgacaaaggggagcgatgcaaggtatcttggtgatactctgaagcttaaagttgcccagggagttgttggagcggtagctgacaaaggttctgttctgaggtttattccgtatacaatgcaagctgttaagcaaggattccaagatcttggtgcatcctctttgcagtcagctcatgatcttttacgagcggagactcttagattagaggtgaggaccggcgccgctcaagtggagggagggatccacgggctggtgtcgtacgagaagaaatcattctagcccccatctttgatcgaggacgggcatactggttctctgcgtgtgttccatccaaggttggcagcgggtcacctgatagtgtttgagagcagcctcccagcccgtctgtgggggccgttcgctcccctatcgatctaccactaccactaggatggttgtaacatcatcatctttccaccatggccatggttgaaaacactggacatcgtaagaaatggctgtaacaataaaagcgatgtttccgtttgctactttgcg

SEQ ID NO: 4521 - DNA, 673 bp, Triticum aestivum
tcatactctggcatatttgtgaagcttttgtcactgggggcttcaactgttatgatgggcagtttcttggctggcagccatgaggctcctggggcctatgaatacaaggacggccatcgagtgaaaaaatacagaggcatgggctccctcgaagccatgacaaaggggagcgatgcaaggtatcttggtgatactctgaagcttaaagttgcccagggagttgttggagcggtagctgacaaaggttctgttctgaggtttattccgtatacaatgcaagctgttaagcaaggattccaagatcttggtgcatcctctttgcagtcagctcatgatcttttacgagcggagactcttagattagaggtgaggaccggcgccgctcaagtggagggagggatccacgggctggtgtcgtacgagaagaaatcgttctagccccatctttgatcgaggaccggcgtaccggttctccgcgtgttccatccaaggttggcagcgggtcacctgatagtgcttgagagcagcctcccagctcgtccgtgtgggtggggctatcgatctaccactaccgctaggatggttgtaacatcatcatctttccaccatggccatggttgaaaacttttggacatcgtaatggctgtaacaataaaagtgatgtttccgtttg

SEQ ID NO: 4522 - DNA, 724 bp, Triticum aestivum
  N_region (32)..(32): n = any nucleotide
cgtccgctgatggtggtatttcaactctggcnaattgtgaaggctttgtcactggggcacaactgtcatgatgggcagtttcttggctggcagccatgaggctcctggggcctatgaatacaaggacggccaccgagtaaaaaaatacagaggtatgggctccctcgaagccatgacaaaggggagcgatgcaaggtatcttggtgatactctgaagcttaaagttgcccagggagttgttggggcggtagctgacaaaggttctgttctgaggtttattccgtatacaatgcaagctgttaagcaaggattccaagatcttggtgcatcctctttgcagtcagctcatgatcttttacgagcggagactcttagattagaggtgaggacgggcgccgctcaggtggagggagggatccacgggctggtgtcctacgagaagaaatcgttctagccccagctttaatcgaggccgtcgtaccggtgtcctacgtgttccatccaaggttggcagggggtcacctgatagtgtttgagagcagcctcccagctcgtccgcgtgggcgtggctgttccccctatcgatctcccgctaggatggttgtaacatcatcatctttccaccatcgccatggttgaaaactttggacatcgtaagaaatggctgtaacaataaaagggatgtttccgtttgctacactgcgagtggaaaggaagaacagcc

SEQ ID NO: 4523 - DNA, 697 bp, Triticum aestivum
cgcccactccgacggggacgtgcttctgcactgcgtggtggacgccattctcggcgccctggggctgccggacatcgggcagatcttcccggacaccgaccccccggtggaagggtgcagagtcctgcgtgttcatgagggaagctgtaaagctaatgcatcaagcaggctatgagctggggaaccttgatgctacactgatcttgcaaaaccaaaaattagcccgttcaaggagactatccgatctaacttgtgtgaactactcggggcggatccatctgttgtcaatctcaaggccaagacacatgagaaagtcgacagtctaggagaaaacaggagtatagctgctcataccgtagttctcctgatgcggaagtagagtgttagaagtatactacataatacaggaattgtattgtattgtagtgttgctgtacaagaggttactacactatccctgtggtatagtcaatacggaagcttcaggggaaagtagtaaagctgagtacacaagagaaatgtgtatccagcctgtgtctcctgttattgttccaaaattgtattcttgttttgcagggtactagatatcaatcattttggaagttcttgttattttcttaccgaccttaagaaccattcacaaattatacagcatatactagtatgaggattttaaaagtgaaaaaaaataaaataa

SEQ ID NO: 4524 - DNA, 693 bp, Triticum aestivum
ccggcaagcaggacacggggacggggggagctgtcgccgggaggagatggagatgacgggaccgcaccccgtcaccaacgcgtcgccatacaccgtcgtggagaccatgtcgctggccaaggcgctcgtcctcttccgcgaggtcggcctgcgccacctcctcgtcgtgcccaaggcctgcgacaggtcgccggtggtggggatcctgacgaggcacgacttcatgccggagcacatcctggggctgcacccggtgctgctgggcggcaagtggaagcggctccggtggcacaaggccgccgtcgccaagtacttccgcgacctcatcgtgcggctcgccaactgcggctgaagcacaaaacacacatcctagtgtatactacctgcattctgctggcaggatgtttgggtgaggatcaatttttgcgcgcctgtgaagaaataattccaaaaaacactgtttcttcttcttattattatcttgattcattacttgtaagtatatttgctcccagaaatagagtggtggtccgtgtatatccgttgggtctgccacgtcttgcactgctgttctttgtgtacattattaacgacggggagatgttctttccggaacttaattattgcggaacatgtgacctgaacgtgtcagctcatggcccgttgtcagctctagttataagaaatggtcgc

SEQ ID NO: 4525 - DNA, 778 bp, Triticum aestivum
gccgaaccgccggcctcccgttcgcgtggccacggcttcgacctccaccgcctcgaccggcctcccgctcatcatcgcggcatcagcatcccccacgaccgcgctgcgacgcccactccgacggggacgtgcttctgcactgcgtggtgacgcgattctcggcgccctggggctgccggacatcgggcagatcttcccggacaccgacccccggtggaagggcgcggactcctgcgtgttcatgagggaggctgtaaagctaatgcatcaagcaggctatgagctggggaaccttgatgctacactgatcttgcaaaaaccaaaaattagcccgttcaaggagactatccgatctaacttgtgtgaactacttggggcggatccatctgttgtcaatatcaaggccaagacgcatgagaaagtcgacagtctaggagaaaacaggagtatagctgctcataccgtagttctcctgatgcggaagtagagtattagaggtatactacataatacaggaattgtattgtattgtagtgttgctgtacaagaggtgttactacactatccctgtggtctagtcaatatggaagcttcagggaaagtagtaaagctgagtacaatgaagagaaatgtgtatccagcttgtgtctcattttattgctccaaaattgtattcttgtcttgcatgggtgctagatagcaatcattttggaagttcttgttattttcttccggaccttaagaaccattcacaaattatatctgcagtatactggta

SEQ ID NO: 4526 - DNA, 641 bp, Triticum aestivum
tcccgctcattcatcgggcggcatctagcatcccccacgaccgcggctgcgacgcccactccgacggggacgtgcttctgcactgcgtggtggacgcgattcctcggcgccctggggctgtccggacatcgggcagatcttcccggacaccgacccccggtggaagggcgcggagtcctgcgtgttcatgagggaagctgtaaagctaatgcatcaagcaggctatgagctggggaaccttgatgctacattgatcttgcaaaaaccaaaaattagcccattcaaggagactatccgatctaacttgtgtgaactactcggggcggatccatctgttgtcaatctcaaggccaagacgcatgagaaagtcgacagtctaggagaaaacaggagtatagctgctcataccgtagttctcctgatgcgcaagtagagcattagaagtatactacataatacaggaattgtattgtattgtagtgttactgtacaagaagaaaaatgtgtatccagcttgtttctccttttattgttccaaaattgtattcttgtcttgcagggtatactaggtagcaataattttggaagttcttattgttttcttccggaccttaaggaccattcacaattatacagcatat

SEQ ID NO: 4527 - DNA, 554 bp, Triticum aestivum
cgggagttcctgccggcgcaggagcggtaccccaaggagtacagcatcgcggcgaggttcgaggcgcaggacttcgacaagcgcggctccggcaagcaggacacggtggacggcgtggagctgtcgccggaggagatggggatgtacgtggacctgcacccgttcaccaacgcgtcgccatacaccgtcgtggagaccatgtcgctggccaaggcgctcatcctcttccgcgaggtcggcctccgccacctcctcgtcgtgcccaaggcctgcgataggtcgccggtggtggggatcctgacgaggcacgacttcatgccggagcacatcctggggctgcacccggtgctgctcggcggcaagtggaagcggctccggtggcacaaggccgccgtcgccaagtacttccgcgacctcatcgtgcggctcgccaactgcggctgaagcatcaaacacacatcctagtagtgtatactacctgcattctgctggcagaatgttggggcgaggatcaatttttgcgcgcctgtgaaataataatttcaaaaacactg

SEQ ID NO: 4528 - DNA, 747 bp, Triticum aestivum
cgccccgtgcttacgcctcgtgctcagggcgcaccctcctcgtgctcctcaggaagcggggagttcctgccggcgcaggagcggtaccccaaggagtacagcatcgcggcgaggttcgaggcgcaggacttcgacaagcgcggctccggcaaagcaggacacggtggacggcgtggagctgtcgccggaggagatggagatgtacgtggacctgcacccgttcaccaacgcctcgccatacaccgtcgtggagaccatgtcgctggccaaggcgctcatcctcttccgcgaggtcggcctccgccacctcctcgtcgtgcccaaggcctgcgacaggtcgccggtggtggggatcctgacgaggcacgacttcatgccggagcacatcctggggctgcacccggtgctgctcggcggcaagtggaagcggctccggtggcacaaggccgccgtcgccaagtacttccgcgacctcatcgtgcggctcgccaactgcggctgaagcatacaacaaacgtacgtacatattacctgcattctgctggcagaatgttggagtgaggatcaatttttgcgcgcctgtgaagaaataattccaaaaaacactgttttctcttcttattatcttgattcattacttgtaagtatattagctccaaaaaacagagtggtggtccgtgtatatccgttggatctgccacgtcttgcactgctgttccttgtgtacattattaacgacgggaagat

SEQ ID NO: 4529 - DNA, 615 bp, Triticum aestivum
  N_region (384)..(411): n = any nucleotide
catcgaggcggcgaactggcgacgcgcacaccttcatcagctcgctgccggaggggtaccagaccaagttcggggagcccggcgtgcagctgtcgggcgggcagaagcagcatcgccatcgcgcgcgccatcgtcaaggacccggccatcctgctcctggacgaggcgacgagcgcgctggacgtggagtcggagcgtgtggtgcagcaggcgctggacagggtgatgaagaaccggacaacagtgatggtggcgcaccggctgtcgacgatcaagaacgccgacgtcatctcggtgatccaggacggcaagatcatcgagcagggggatcaccagcacctgatcgagaacaagaatggcgcctaccacaagctcgtcaacttnnnnnnnnnnnnnnnnnnnnnnnnnnnnggggggcagagctcatgagctccctggggaagaaccatgtgcttctgtatccagctgggcttccctcaagttcatcgaatgtaaaagctgtgctctacattttctttttcttaaagtgtgtgttcaccattatacagggagaagtgctctcatgttgatttctttgtagcagtagatagtaattgcaattttcatttaggatat

SEQ ID NO: 4530 - DNA, 664 bp, Triticum aestivum
  N_region (394)..(424): n = any nucleotide
gaggtcatcgaggcggcgaagctggcgtacgcgcacaccttcatcagctcactgccggaggggtaccagaccaaggtcggggagcgtcggcgtgcagctgtcgggtgggcagaagcagcgcatcgccatcgcacgcgccatcgtcaaggacccggccatcctgctcctggacgaggcaacgagcgcgctggacatggagtcggagcgcgtggtgcagcaggctctggacagggtgatgaagaaccggaccactgtgatggtggcgcaccggctgtcaacgatcaagaacgccgacgtcatctcggtgatccaggacggcaagatcatcgagcagggggatcaccagcacctcatcgaaaacaagaatggtgcctaccacaagctcgtcaacttnnnnnnnnnnnnnnnnnnnnnnnnnnnnnnngagggccagagctcatgagctccctggagaagaacgatgtgcttctgtatccagccgtctctttcatggcttccctcaagtacatcgaatgtaaaagctgtgctctacattttctttttcttaaagtgcgtgttcaccattatacagggagaagtgctctgatgttgatttctttgtagcagtagatagtaataacaagtttcatttaggatatatatatatatgcactgttgctgggtg

SEQ ID NO: 4531 - DNA, 561 bp, Triticum aestivum
agaagatctctcagatagaaaccaagatagagaaaatggagatggataagaagacgaaggaggatttgaagacggtggcattagggacatcaaagatcaactaccttgatcccagaattacggtagcatggtgcaaaacccatgaagtccctattgagaagattttcagcaagacgattcttgcgaagtttggatgggcaatggatgtcgagccggatttcagattctaagagtattggcttccgggtgagccaatggccccttggtaaattcgattcagcttccaggccttctcccggacccctaactgcaactagtagtaaaggaagagctcggtgtttgttttttaagtccccctgctcctggaagaaggaagcacccagcattctctttgtaggctctttttttttctttctacccatcttctcttctgtacttgctatggcccaattgcctaaagtcgtgttttgcatttcatttgggctgacggattttagcttgttgagaactgatgacattcatttatataccggagtcatctaaatatagataccatcagag

SEQ ID NO: 4532 - DNA, 577 bp, Triticum aestivum
atgggaacccaaagagagctttggcacctgaagcgattgagaagaagatctctcagatagaaaccaaggtagagcaaatggagatggataagaagacgcaagaggatttgaagacggtagcattagggacatcaaagatcaactaccttgaccctagaattacggtagcatggtgcaaaacccatgaagtccctattgagaagattttcagcaagacaattcttgcaaagtttggatgggcaatggacgtcgagccggatttcagattctaagagtattggcatccgggtgagccaatggccccttggtaaattcgattcagcttccaggccttctcccggacccctaactgcaactagtagtaaaggaagagctcggtgtttgtttttgaagtctccctgctcctggaagatggaagcacccggcattttctttgtaggcttttttttctctacccatcctctcttctgtacttgctatggcccaattgcctaaagtcgtgtttgcatttgggccgatgaattttagcttgttgagaactgatggacattcattttataccgcatcaatcacaaat

SEQ ID NO: 4533 - DNA, 705 bp, Triticum aestivum
  N_region (575)..(591): n = any nucleotide
ctgtccatgttgtgaatgtcataaatggcgtacagtttcacgaaagatgaatctgagacattcgtgagaacttcactgaagacccatggttctcagtaaaagacctgagtgctcgtgtgaagaccctccagacattgagtatgacagcagccgcatatgggtcatcgacaagcccaacataccaagcctccgcccaagaccgagagacttgtgatcatgagaggtgatctgtctaaaatggacatctactatgtcctgccaaacgggaagcgtgcaaggggcatcggggacgtgcagaagttccttgacacaaacccagagtacaaggaccgcatatcagctgaaagcttcagttttacggtgcccaagattgttgaggagaccgtttcacagagctctttgtggaagactaaaaaggctaaaaagcaggacaagataaatgcttcaagcagcaagaaggacaaggcaaatgcttcaagcagtgagaactagccatgtcagcaaatgcaaaactgtcgcctgcctgcttggatgatcctacctcatctaccttgaagttagtcatcaagtcggtnnnnnnnnnnnnnnnnngcgatgttactctgagcgctccaatgcactgaatctcttcctttttatgcatgagtttctggtaaaattctgagatgctcgagaagggctgtagcttgttctcttctaataaaa

SEQ ID NO: 4534 - DNA, 728 bp, Triticum aestivum
tgcaacggatcattggccttgtatgctgtccagtgttgtgaatgtcataaatggcgtacagtttcaacgaaagatgaatttgagaccacttcgtgagaacttcactgaagacccatggttctgcagtaaaaaacctgagtgctcgtgtgaagaccctccagacattgagtacgacagcagccgcatctgggtcatcgacaagcccaacataccaaagcctccgcccaagaccgagagacttgtgatcatgagaggtgatctgtctaaaatggacatctactatgtcctgccaaacgggaagcgtgcaaggggcatcggggacgtgcagaagttcctcgacacaaacccagagtacaaagaccgcatatcagctgaaagcttcagttttacggtgcccaagattgttgaggagaccgtttcgcagagctctttgtggaagactaaaaaggctaaaaagcaggacaagataaatgcttcaagcagcaagaaggacaaggcaaatgcttcaagcagcgagaactagccatggcagcaaatgcaaaactgtcgcctgttgcttggatgatcctacctcatctaccttgaagttagtcatcaagtcggttctctctctctgcgatgttactctgagcgctccaatgcactgaatctcttcgtttttatgcatgagtttctggtaaaattctgagatgctcgagaagggctgtagctttttctcttctaataaa

SEQ ID NO: 4535 - DNA, 703 bp, Triticum aestivum
tggttctgcagtaaaagacctgagtgctcgtgtgaagaccctccagacattgagtacgacagcagccgcatctgggtcatcgacaagcccaacataccaaagcctccgcccaagaccgagagacttgtgatcatgagaggtgatctgtctaaaatggacatctactatgtcctgccaaacgggaagcgtgcaaggggcatcggggacgtgcagaagttcctcgacacaaacccagagtacaaagaccgcatatcagctgaaagcttcagttttacggtgcccaagatcgttgaggagaccgtttcgcagagctctttgtggaagactaaaaaggctaaaaagcaggacaagataaatgcttcaagcagcaagaaggacaaggcaaatgcttcaagcagcgagaactagccatggcagcaaatgcaaaactgtcgcctgctgcttggatgatcctacctcatctaccttgaagttagtcatcaagtcgggtctctctctctgcgatgttactctgagcgctccaatgcactgaatctcttcgtttttatgcacgagtttctggtaaaattctgagatgctcgagaagggctgtagctttctcttctaataaaaagatctagttacagatgtccttgagtttaccatccgccgtgatacattgttttaccagatggccatatgcgtagagatctcattagaaagc

SEQ ID NO: 4536 - DNA, 1233 bp, Triticum aestivum
tgtctggaatgtgacaacccagtggaccaccacctatctgatgctcttggctgccttggattataggcaagctttcattacactagaaacagttgatgacaactacatatgaagcaccatcagctgaggactggaaaaaaaattgaggctgccttgcaattacttgaggctgctctatgactcggctcatagcatcatggcagcaggaaacccaacctcaaacattttcttccatgaagcttggaaactgcagctagagctgggaaatggttcagcacacgaagatccaattttcagtagcatcgccaaagacatgtatgagaggtttgacaaatactggaaagattgcaaccttgtgttagctgttgctgttgtgatggatccacgttttaagatgaagcttgttgagttcagttactcaaagatttacggcgttgaggctgcgaagtatgttaaggtggtaaatgattcggtgcatgaccttttcaaggattatgtcgcacagccgctccccttaacaccgacctatgctgaacaagggaaaactgataatgctactgccaatgggaacaacacccaagcaactcaaccttcagctggtgatggccttcaagactttgatatatatctttccgagattgccacaacccagccctcaaaatctgagctagagcagtacctggacgagtctctcactcctcgcatccaagagtttgacattctcaactggtggaagctcaacatgcagaagtatccgacgctctcaaagatggcgcgggacatcttggccatcccggtgtccatggtgaccggcggaacctctatattttccgcaggaacagggtgccacgtgctcgacgactacagaagctcgctccgtccggagatcgtggaagcgctcgtctgtgcgaaggactggcttctgaattcgaccgccgcgccggaggcggcgccgggctctgggcttctcaagatggactaggctcgcttcctttgctgaagcatgcatatatgtcttctggcgcctgtgagtggtctttttaactgtagtcgtgttttaggcagagtttgtggactggctgcgatcgatgatttcattggatctgtcctagaatgtaatttgccgtgtagaactctgttaactcctccatgctgttatgtccaccccttccttgtgttgtaatatgtgaccagagatgttatctgacgttgtttgggatgtgtatgtgcaag

SEQ ID NO: 4537 - DNA, 1079 bp, Triticum aestivum
gcccgaaaccctagctctctgctttcatccccgccaccgtccccatggcgccagggctcaaacgcttcaccgacgtcgcggcagacggcacgccccgcctcgacgacgccgccggcgaggagctcgtgtgcgtggagcgcgccgcctcggtcgccctcggcagccgcgcgccggagcccccgggaaccctcttcatcaccaccaggagggtgatttggctcagcggggcggagaagggcaaaggatacgcggtgggcttcctggacatcactctccacgcagtgtcgcgcgacccggaggcgtacccctcgccgtgcctctacactcagattgaagccgaagctgactctgatgaagaggatggtgattttgactctgaagcaggtggtgactcacagctaccaaaaatctctgagatgcgtattatattggcagatgctgcccaactagattcactttttaatgccttctgccattgtgctgaactgaaccctgatcctactgctgaagaaaatgaagacagtgacttgttccatggtggggatatgaccaatggtggttggattcatggcgatgaagatgaacacatggttgatggaatcgaccctgagttttttattcccaacccgataggtcaaaatggtggagatgacctcagttcttcagtacttgagcttcaaatcaatgaccagcgtttcgaggatgcggatgaagaggaggcccatgaaaatgggcattagaagcagatatatgctcgttttacttatcatgatcctcgtgaggaccatgtcattagtttggttgaagattgctgtagatgcagcttggttcgcctcatgctgttgtgtcccacactttccttttgtcctttaatagacgctgctataggatcgaggactctgagggcaaccgtgtagagttgcgtcgatggtaacttttatgggagaaggtcttgcttactggtcaagaatgtaacatgtagagcttggtggagaatccgattgatggatttcaataacttttgatctaacaaatggaagggggagatgggggaaagtagtagtaactcttttcgaagg

SEQ ID NO: 4538 - DNA, 666 bp, Triticum aestivum
tggaccgggtcggcgctgcacgccgccgtcaacttcgggcagtacccgtacgcaggttaccacccctacaagccgtcagcgagccgccgtccgatgccagagccggacaccgaggagtacgccttgctggcccgcgacccggaaaaggtgttcatccgcaccatcaccaaccaaatgcaggccatcattggcatttctctgctggagatcctgtccaagcattcctccgatgagatttacctcgggcagcgtgacacgccggagtggacgtcggatgccaaggcactggaggcgttcaagcggttcggcacgaggctggagggcatcgagagccaggtggtggccttgaacggaaacccccagctcaagaaccgcaatggaccagcccagttcccctacatgctgctctacccctacacctccgaccacacgggcaaggccgagggcctcacggccaggggcatccccaacagcatctccatctgatgagatatttggaggaaggtcgttgctcgccagcatgcaaaatgttggggtgtgtgcttctaggatcatttgcttgaataatctagtacaccggtgctcatttgacacccagtgttatgtgcgtgggtagccactggtcagccactagctcaactggatgttccatgtaatttttccata

SEQ ID NO: 4539 - DNA, 700 bp, Triticum aestivum
ggctgcgccaccatcatctggaccgggtcggcgctgcatgccgccgtaaacttcggggcagtacccgtacgcaggtaccaccccaacaagccgtcagcgagccgtcgtccgatgcctgagccggacagcgaggagtactcactgctggcccgcgacccggaaaaggtgttccatccgcaccatcaccaaccaaatgcaggccatcattggcatttctctgctggagatcctatccaagcattcctccgatgagatttacctcgggcagcgtgacacgccggagtggacgtcagatgccaaggcactggaggcgttcaagcggttcggcacgaggctggagggcatcgagagccaggtggtggccttgaacggaaacccccagctcaagaaccgcaacgggccggcccagtttccgtatatgctgctctaccccaacacctccgaccacacgggtgaggccgaggggctcacggccaggggcatccccaacagcatctccatctaatgagatatttggaggagcattgttgctcgccagcatgcaaagatgttggggtgcgtgcttcgaggatcattgcttcaataatctagtacaccagtgctcatttgacacccaagtgttatgtgcgtgggtagtcacatggtcaatgtatgttccatgtaattttccccttccaaattatatattaataaagtgatg

SEQ ID NO: 4540 - DNA, 793 bp, Triticum aestivum
gcgtggtggaaggaggtacgcgaggtcggccacggcgatctcaaggacgcggcatggtggcccaagatgatgacggtggcggagctggtcaaggcctgcgccaccatcatctggaccgggtccgcgctgcacgccgccgtaaacttcgggcagtacccctacgcaggttaccaccccaacaagccgtcagcgagccgtcgtccgatgccggagccggacaccgaggagtacgccttgctggcccgcgacccagaaaaggtgttcatccacaccatcaccaaccaggtgcagtccatcattggcatttccctgctggagatcctgtccaagcactcctccgacgagatttatctcgggcagcgtgacacgccggagtggacctcggatgccaaggcgctggaggcgttcaagcggttcggcacaaggctggaaggcatcgagagccaggtggtggccttgaacggaaacccccagctcaagaaccgcaatggaccagcccaattcccctacatgttgctctaccccaacacctccgaccacacgggcaaggccgaggggctcacggccaggggcatccccaacagcatctccatctgatgagatattcggagaaaggtcggttctcgccagcacgcaaaaatgttagggtgcgtgcttgcaacaacattgcttaaataatccagtacattagtgctcatttgacacccaagtgttatgtgcatgggtagccactggccaatgtatcatcttccatgtaattttcccttccaaattatatattaataaagtgatg

SEQ ID NO: 4541 - DNA, 881 bp, Triticum aestivum
gaaaagccgacggcagaaggaacgcgaagcaatcacccccttctccccccgttgcttccccgcgccgaactcgaatcctccccctcgcgccgcacccgagggctccgccggagatcggtcgaggggacgcggccctagctggagatggtcgccgccgtggtgaactacccgctcgtcgcggggctcctcgccttcgcggtcgcgcagtccgccaagttcttcaccacctggtataaagagaaacgttgggatgccaggcaatttatagcttctggagggatgccatcatcacattcagccacagtgacagcacttgcagtgtctgttggaatccaagaaggctttcgtagcgccacatttgcaacttcagtgatacttgcatgtgtggtgatgcatgatgcttttggtgttcggttacacgctggaaaacaagcagaggtgttaaaccaaattgtctacgagctgcctatagagcatccgctggcagagacaaagccattgcgtgagattcttgggcacacagtccctcaggtggtggctggttgcatccttggaatcctcacggctgtggtcatgctcttagctctggggagaggcaatatttgatcatctaatatcgcatcgccgatcttgtaaagcatacaaaagaagctcatctttgatgtaatgtgtaaaagtggcctgtccatgctgctacaaagtcttaactgatatagatctgcgctgtaggattgtaggtcgtagcttcagttggtgctgtaaatctgagatgtttgctgtcgatcagaacctcctcatgttgaatgtttgctgtacaactagcagtgatatgtagcttgagaacgtgatggttctgaatagttgataccacgtcataagct

SEQ ID NO: 4542 - DNA, 1242 bp, Triticum aestivum
  N_region (270)..(270): n = any nucleotide
ctccagccgcccatgcccacgccctacgtcgagcaccagaaggccgtcaccatccgcaacgacgtcaacctcaagaaggagacgctccggattgagcctgatgaaggctgtcccggttgcttcctcgtcgccttcaccttcgatgccaccgtcgctggaagcatgactgtctacttctttgcaaaggaagagctcaattgcaatctaacagcaatgaagccagacttgattaagcctgttactgttagcttcaaagagggtcttggccanaagtttaggcaaccttctgggacgggaattgacttctcagcgtttgaggactctgagttgttgaaacaggggggaatggaaatatatccacttgcagttaaagctgaaacaacactgtctgctgatcaaccatcggagggggaagaccagaagccaaaaactccaaactcgcagatcacacaggctgtgtttgaaaagaaagaaagtggcgactatcaagtacgagttgttagtcagatcctttgggtgaatggcaccaggtatgaattgcaggaaatatatgggataggaaactctgtggaaggggacactgatgcaaatgatcctgggaaagaatgtgtcatatgcctctcagaacctagggatactactgtccttccatgtaggcatatgtgtatgtgcagcgagtgcgccaaggtcttgaggtaccagaccaccaggtgccccatctgccgtcagccggtcgagcggctgctggagatcaaagtgaacaacaaagctgaagagccgccccagcagacgtcccagtcgcctccgctacctccaccccctgctctgcatcaggaagagatgtagctacagcctatcacgaacagcgtaaaaacactatatgcttctagattgcggtcttcgggccttctccccctgcagggtgctcacttcgtctgagcacaccgggtgtaactgttaaactcgcctcggttacctgtagtgtatgtaaagcgtgttgtaaagcttctggcaccatgaagcggctcgccgactcccggcggggagccctgcagatgccgagatgaggacatcttatacgttcatgcgtgtgctgttgactagctgaagaagttgcagcagggttgggggtgtgcctcgtgcctgcctggtttcctctgtcgggggaggggggaaagaggcacggaaggtgcctccaggtttgtacaaagtctcgtaatttctatcatatcataaattacc

SEQ ID NO: 4543 - DNA, 846 bp, Triticum aestivum
ccccctcaagaacaccatggactcggtgaaagacgtgctggggaagatgggcaagagattcggcgaggccgcccgcaagacggagaacaccgccggcaacttctggcagcacctgaaaactggaccaagtattgctgatgcagcaatgggcagggtctcccagatcaccaaagtcatagcagaaggtggatatgagaaaatcttccatcaaacgtttgatgtcctccctgaagaaaaactcaagaagccattcgcatgttatctgtcaacctctgctggtcctgttatgggtgtgctctacctgtccaatgtaaagttggccttctgtagtgataacccacttgcatacaaggttggggacaaaaatgagtggagctattacaaggttgccatcccgctagcccagctgaggtccgttaatccttcgacgagcagaacaaacgcagctgagaaatacatccaggtggtctcggtcgataatcacgagttttggttcatgggctttgtgtactatgacagtgctgtaaagcacctgcaggaagcactccaggaggcccgtattttgcaagcttagtgatgtctataggtttggactagcatacagttgtggtatactttgtgtgtcagacaaactgggagttgcccatgtgtagtttgataggtgttgtcgtttgctgcgattcgtgtcactttgaactgggtttttcgatttgtggcatcatatccatcctgtcatgttcgttcatgtgttgtttgatgtctacgaattgaattttcattttgcttccatgaaagagcagtatgttctgaggtagatgcttgtagtacaaagtaggcagattgcag

SEQ ID NO: 4544 - DNA, 958 bp, Triticum aestivum
gggactggatctttctatggaaatcttgactcaggcggagaatgtggtgttcctgcgcaaactgtattctatactcctgctgagaaccgtgcaaaattctggtatgcgacagattatggcatgttcaggttctgcattgctaacacagaagaagattggaggccagggaccgagcagtacaagttcattgagcaatgcctgtcgtcggtcgacaggcagaagcagccctggctcatctttctggcacaccgtgttcttgggtactcatcctgcacttactatgagacagagggcacattcgaggaaccaatgggacgagaagctctgcaggagctctggcagaagtacaaggtcgatctcgccttctacagtcatgtccataactatgaaaggacatgtccagtctatcagagccaatgcaccgttgatgcatcggatcattacagtggcccgttcaaggcaacaacacatgtggttgttggtggtgctggcgctagcatttcagattcagcattcaccacatcaaatatccagtggagtcacttcagggatttcgacttagggttcgccaagctcacggccttcaaccagtcatccttgctgtttgagtacaagaaaagccgtgatggcaatgtgtatgatcatttcacaatttcgcgggattaccgagatgtcctggcttgctccatcgacaactgcccaaggactacgctggcttcctgaagccccaacactttcaaacagggaatcagtttgatctgctaatggttgctggtttgtgtgtggctcaatactagtgtctaagatatttacatagctttgaaacttgtattggctacctgaagccccagtacattcagatgggggaatcagtcgatgtgctactggtaactggtgtgtatgtggcccaatacaagtctgtaagatatttaaatattccaattctgtatacgaaata

SEQ ID NO: 4545 - DNA, 677 bp, Triticum aestivum
ttgatatggtggtaattctgaagttgagagaagatatcatagtacagaagtgccttggtagacgtatttgtagccagtgtggtaagaacttcaatttggcctgcattgatgtcaaggctgaaaatgggctaccaccgatctacatgtcaccattgttaccccccaataactgcatgtcaaagcttcttactcgagacgacgacaccgaagaggttgtgagaaatcgcctgcggatctacaataaaatgagtcaacctgtggaggatttctaccagaagcaggggaaggttctcgagttcgatttacccggaggaatccccgagtcttggccaaagctgcttgacgttctgaatctcgaggaccagcaggagatgaagttggccgcggcgtaagtcctgcccgtgggaaataccttacatagtccaaagcataccttacatttttttcaataatgggaataaagataaaactcttgtttccatagatatgtgtgcctttgtgagagtaatttttgaccagtagtgagctatttattctcgctggcgttttcgcgagccggtgctatgtaacgatcataacgatattttgatcttgacttatttgagtgagcgggttgtggtgcgtaagggcaccatgtaatgttgattcaaagatgaagagtgatagactgtcatctg

SEQ ID NO: 4546 - DNA, 600 bp, Triticum aestivum
  N_region (4)..(4): n = any nucleotide
gtcngcggttccctgcactgcgagacggacaagacgccgcagtggaggacggggcccatgggccccaagacgctgtgcaacgcgtgcggggtgcgctacaagtcggggcggctggtgccggagtaccgcccggccgcgagcccgacgttcgtgacgtcgaggcactccaactcccaccgcaaggtgctcgagctccgccgccagagggagatgcaccaccaccaccagccgtcgcagctccagcagcacgcggtcgccggcggcgtcgggaggataatgcacatggagagccacctgctgttcgatgggccggcggcgccgcccatcctcggcggcggcgacgacttcttgatccaccaccgcctagggacggcagactaccggcagcagctcatctagacgagtcgtcagtctgttagaactgatcagtttagcccagaaataataattaaaagcagctaaaaccccaagagccggaaatatcggaagaactgcaaatgtttgcttattaggagttatattttcccagttttctctctgcttccgtttggttagcccgtgtgctttttgttgagctcgaaattttcgtgtccatttaga

SEQ ID NO: 4547 - DNA, 734 bp, Triticum aestivum
cccgcctgctcgttctcccgcaggccccggcctccccgccgtccccggcgtccatggccatctcgccggcggagtctggcgtctcagcccaggcgttccatgtcaagaagccttccaagccggccaagaagaaggaggtgccgccgcaggcaaggcacaggctcaggctcagtcagtgagcgcgcccacagcgccctccggcgtcacggcggcggccaacgaaggtcggcggtgcctgcactgcgagacggacaagacgccgcagtggaggacggggcccatgggccccaagacgctgtgcaacgcgtgcggggtgcggtacaagtcgggccggctggtgccggagtaccgcccggccgcgagcccgacgttcgtgatgtcgaggcattccaattcccaccgcaaggtgctggagctccgccgccagagggagatgcaccaccaccaccagccgtcgcagctccagcagcacgccgtcgccggcggcgtcggaaggataatgcacatggagagccacctgctgttcgacgggccggcggcgccgcccatcctcggcggcggcgacgacttcttgatccaccaccgcctagggacgacggactaccggcagcaactcatctagacgagtcgtcagtctattagaactgatcagtttagctcaggaataataatgaaaagcagctaaaaccccaagagccggaaatatcggaagaactgcaaatgtttgcttatta

SEQ ID NO: 4548 - DNA, 716 bp, Triticum aestivum
ccaagaagatgaagatctccaggatgccctggactccgtagggaacccatgagtgtggaggagatcctaacaatgtgatatcaagcctggctggaagaagggcacaaagatcacctttcctgagaaaggcaatgagacccgtaacgtcataccatcagatctcgtcttcataatagaagaacgggcacacccgaaattcaagagagatgggaacgaccttgtttacacgcatatgatctccctcgtggatgctttgactggctgtgcagtccagctgacaactctggatgggcgaagtttaaccgttcccgtgaggtctgtcatcagtcccacctacgaagaagttgttcagggcgaagggatgccaatcacaagggagccgtctaagaaagggaacctaaggatcaagtttcagatcaagtttcccactgctctaaccgctgaccagaaggcaggggtccagcaacttctgtcttagctgttcgtgcaacgtgagtctacgttcttttccttttgttgagcagttgggaatagacgggtgacatggttacaaaaattgctgaatgtacaatcactatttcgtgctagtgtaaagcgcatgctttcggtactctatttccagcttgactcttggttgctaaaatgctaactgctgacgtgctagcagctgttagcctagtggatctgccttccttttagaagttaacagttcttga

SEQ ID NO: 4549 - DNA, 821 bp, Triticum aestivum
ccgctgcaggattctctccagggtcaggggagcgtccggagggtcgcgaggaagggacgcgatcgacgcagctagcgtgcagtctggaagacctgcacaagggcgccaccaagaagatgaagatctccagggatgtcctcgactccgtcgggaaaccaatgagtgtggaggagatcctaacaattgatatcaagcctggatggaagaagggcacaaagatcaccttccccgagaaaggcaacgagacacgtaacgtcataccatcagatctcgtgttcataatagaagaacgggcacacccgaaattcaagagagatgggaatgaccttgtttacacgcataagatctccctcgtggatgctttgactggctgtgcagtccagctgacaactctggatgggcgaagtttaaccgttcccgtgaagtctgtcatcagtcccacctacgaagaagttgtgcagggtgaagggatgccgatcacaagggagccgtctaagaaaggtaacctaaggatcaagtttcagatcaagttccccaccgctctaacagctgaccagaaggcaggggtccagcaacttctgtcttagctgttcgtacaatgtgagtccacgttcttttccttttgttgagcagttgggaatagacggttgacatggttacaagaattgctgaatgtaaaatcactatttcatgctagtgtaaagcgcatgctttccgtactgtttccagcttgactcttgattgctaaaatgctaactgctgacatgctagcagctgttcgcctagtagtggatctgccttcctcttagattatctgatgt

SEQ ID NO: 4550 - DNA, 1409 bp, Triticum aestivum
ctgccgcatcaccgtcgccgtcgatggagcgacctactaacagtgctcgctctgcccggcgccaccgacgacgagctcaagaaggccttccccgcctcgtcatgaagtaccacccggaccagaacccctctccgcaggccgacaccctcttcaagcaggtctccgtggcctacgacgtgctcagcgacccggataagcgcgccatctacgaccagtacggcgaggaggggatcacagcgggctcccccgccctccccctccccgcgcacgcgcacgcgcacgcccacggcttcgcgcggcacggtcccgggttccgcttccatccgaggagcgccgacgagatcttccaggagatgttcgggggttcgttcttcgggcagggccgcgcggcccttggagcggaggcagcgctccgcagtctgtcccggggtgcgcagccagcgttgccgccgccgctgcaggattctctcccgggtcaggggaggcgtccggggggtcggcgaggaagggagcggcgatcgagcggcagctagcatgcagtctggaagacctgcacaagggcgccaccaagaagatgaagatctccagggatgtcctcgactccgtcgggaaaccgatgagtgtggaggagatcctaactaattgatatcaagcctggatggaagaagggcacaaagatcacctttccagagaaaggcaacgagacacgtaacgtcataccatcagatctcgtcttcataatagaagaacgggcacacccgaaattcaagagagatgggaacgaccttgtttacacgcataagatttcgctcgtggatgcattgactggttgcgcagtccagctgactactctggacgggcgaagtttaaccgttcccgtgaagtctgtcatcagtcccacctacgaagaagttgttcagggcgaaggaatgccgatcacaagggagccgtctaagaaagggaacctaaggatcaagtttcagatcaagttccccaccgctctaacagctgaccagaaggcaggggtccagcaacttctgtcttagctgttggtacaatgtgagtccgccttcttttccttttgtcgagcagttgggaatagacgggtgaaatggttgcagaatttgctgaatgtaagatcactatttcgtgctagtgtaaagcgcatgctttccgtactgattccagcttgactcttgattgctaaaatgctaactgctgacatgctagcagctgttgccctagtggatctgccttccttttagaagttaacagcattaatcagattctgagtttcacatttgctacgggatgcgatagttcttctatcatgtcccagtcttcctggcatatttttttctagaaaattaccatgtttctgattttgccatgttactttgatagaatca

SEQ ID NO: 4551 - DNA, 701 bp, Triticum aestivum
agacatattcttagactgtgaccgtgatcaataatatatctgtacgccagatggacctacatgccatacaggggcagagacctgctactattcttcagtctatgatgcactacaaggttcaaagtccaatcaagagaggcaggtcgccacaactctctactctcttgaagacacgatcagtaggcggaaggaggagatagttactgaagggagtggtaagccatcatggacgaaaaaactactgcttgataaccagctgctttgctcgaaaatacgcgaagaagcgggggaactaattcaaacactggttgagaacgaggacaaatctcgtacagcctcagagatggctgatttgctgtaccacgcaatggtgcttctgagcgtgagggatgtgaagatggaagaggttctggaggtcctgaggaaacgcttttcgcagtccggagttgaggagaaggccagccgcaagaaatcttagcatgatcgcatgtaggtggatgaattccttgtgattgggcagggtgtagtatggagttgtccagctttcttacagtatcacctgagatttagtatcattttgctctctaagaagactgaacttgtgttgtgttttttatttttattttcccttgcacagtcacagcggcaccgttgctgctttggccaataaagtttgtttgctgtgtacccactatatatgt

SEQ ID NO: 4552 - DNA, 660 bp, Triticum aestivum
ctatgatgcactacaaggttcaaagtccatcaagagaggcagtcgccacaactctctactcgcttgaagatacgatcagtaggcggaaggaggagatagttactgaagggagtggtaagccatcatggacgaaaaaactactgcttgataaccagctgctttgctcaaaaatacgtgaagaagcaggtgaactaattgaaacactgcttgagaatgaggacaaatctcgtacagcctcggagatggctgatttactgtaccacgcaatggtgctcctcagcgtgagggatgtgaagatggaggaggtgctggaggtcctgaggagacgattttcgcagtctggcgttgaggagaaggctagccgcaagaaatcttagcatgatggcatgtaggtggatggatgaattccatgtgattgggcagggtgtagtatggagtagtccagttctgctatggtaccacctgagatttatgttttctcatcatgctctctaagaagaagactgtgaacttgtcttgtgttttttattttaccttttcccttgcacagtcgcagtggcgttgttgctgctttggccaataaagcataatatgagtctctgacccatgatatatgtgggtgatttatagtatggaaactatgttttgtcgtgcaaaata

SEQ ID NO: 4553 - DNA, 746 bp, Triticum aestivum
tgctgctcatgtctgacttgctgtagaactttttaaggaggactcggaccaaatgcggcacagaccaggcactgaaaattaggcacaataaacccatgattgagagagtgagcaagcaaagtgagaacctcagctggctatttgagatcctggtgaacaatgatatggcagagaatttcgtcgtgctgtggccgggcaagacgatctcatcaggatgcacgagcaagcgtcaccgatgttcaggtacgagctaagccggatatcagcgggcgtgttcgtcgccctcgggcaagggaaagtgcagtgccccagcgatctgaggagccaactgttccggggatggttcacgccgatgttaactgatttcggctggcttcaaaggtgctcgaaaggactggatgcgagagcgctggaggatagcctggggcaagcccttctcacccttccgcttcgggagcagcagagcctatttgaggaatggttccagtgctttgcatctaggggcgcggaatgcccgaaccttagccgagccttccaggtatggtggcgaaggtcattcactagatagattgtcggtagagccctggagcagcagaagcctatgggatattgcttggtccgcatgagttatatcggtatttgtagtgtgtgtgtgtatgattgtaagataagaagaattcctgttagcctgtagagttgaatttttgtttatgatcttgcctcagttcttcccagtgtatgcacta

SEQ ID NO: 4554 - DNA, 669 bp, Triticum aestivum
acccatgattgagagagtgagcaagcaaagtggaacctcagcgggctattggagatcctggtcaacaatgatatggcagagaatttcgtcgtgctgtgggccgggcaagacgatctcatcaggatgcacgagcaagcgtcaccgatgttcaggtacgagctgagccggatatcagcgggcgtgttcatcgcgctcgggcaagggaaagtgcagtgccccagcgatctgaggagccaactgttccggggatggttcacgccgatgttaaccgatttcggctggcttcaaaggtgctccaaagggctggatgcgagagcgctggaggatagcctggggcaagcccttctcaccctcccgctccgggagcagcagagcctattcgaggagtggttccagtgcttcgcgtctaggggtgcggaatgcccgaaccttagccgagccttccaggtatggtggcgaaggtcatttgctagatagatcgtcggtagagcccctggagcagcagaagcctatgagatattgcttggtccgcgtgagttatatcggtgtttgtagtgtgtttatgattgtaagataagatgaattcttgttagcctgtagagttgaatttttgtttatgatcttgcctctgttcttcccagtgtatgcgctacttgacagtcagagtca

SEQ ID NO: 4555 - DNA, 692 bp, Triticum aestivum
ctttttaaggagactcggagccaaaatgcggcacagaccaggcactgaaagtttaggcacaataataaacccatgattgaaagagtgagcaagcaaatgtgagaacctcagctggctatttgagatcctggtcaacaatgatatggcagagaatttcgtcgtgctgtgggccggacaagacgatctcatcaggatgcacgagcaagcatcgccaatgttcaggtacgagctaagccggatatcagcgggcgtgttcatcgctctcgggcaagggaaagtgcagtgcccgagcgatctgaggagccaactgttccggggatggttcacgccgatgttaaccgatttcggttggctccaaaggtgctccaaggggctggatgcgagagcgctggaggatagcctggggcaagcccttctcaccctcccgctccgggagcagcagagcctgttcgaggaatggttccagtgcttcgcgtctagtggcgcggaatgcccgaaccttagccgagccttccaggtatggtggcgaaggtcattcgctagatagatttgtcggtagagcccctgcagcagcagaagcctatgagatattgcttggtccgcgtgagttatatcggtatttgtagtgtgtgtatgaatgtaagataagatgaattcctgttagcctgtagagttgtatttttgtttatgat

SEQ ID NO: 4556 - DNA, 635 bp, Triticum aestivum
gaaaagaaggctgagctgtatgagaaattatccaggggtgagctacctgatgaagaagaccaggagaaatattgcgttgatttcttccagaaaagttttcatcaagtcagcgagcggcggcagccagagactgctactgcctctgagcatgtagaacaagaaaatgagagtgtcgattctatgctaaatcccaagccagtgggccttggacgaactggtacaacagttgaccaagatgagcacaaacgctttgtcagggaggttcacgacgaagtaagtcaagcaaggcagaaggcttcaacgatgaaacaccggcgacaagagcaggagtcggctcgtagagagaaactcaggcaagctttcctcaagaagcgccttgataagttgatggctgaaaagcaggcatcttcggccagtgatgaccaaccagttagctagtcgaggttttgtatgtcttacttgtctccaggtggcagttgttgtagttcatgtaatcacggttcatgcaactgcaaatgagaagatttgtcttgtttgtggttcccttgatctggcgaaatcaaattcagaaaatggtcttggaatgtacagtcacgcaatgtagaggtaatttgaatcttacactgacgaggtgt

SEQ ID NO: 4557 - DNA, 1132 bp, Triticum aestivum
ctcctcgcccaatccccccttcttcgtcccacgacagaccaatttcttcccaaatcgccaccgccaccgccatgatgtcgtcaccggcagataccgcgccgtcatcctcctccgcggcctcggccgctccgaatcagcatccacagccgccggcgcagcaggctgatacgaaggagcggcggatggagtcgctcgggtggctgacggagtccacggtgatgcccaagaagcacaaggccatcgagggcgtcggcgcggcatccatactcgacctcaaggcccagctctaccgcactcaggaggaagcccgcaattccaccgccgctgacgccgcctccagcgagttccgccgcgccaagaaacgctcgggccccgccgaccccctgggcgccaagaactcaggtgtagacgctcgtgcccacaaggataagctggagctgaaagctgtgaaagatggtactgcatgttattctgccctagaaaagaaggctgagctgtatgagaaattatccaggggtgagctacctgatgaagaagaccacgagacatattgcgttgatttcttccagaaaagttttcatcaagtcagcgtgcgccggcagccagagactgctactgcccctgagcatgtagaacaagaaaatgagagtgtcgattctatgccaaatcccaagccaatgggccttggacgaactggtacaacagttgaccaagatgagcacaacgctttgtcagggaggttcacgacgaagtaagtcaagcaaggcagaaggcttcaacgatgaaacaccggcgacaagagcaggagtcggctcgtagagagaaactcaggcaagctttcctcaagaagcgccttgacaagttgatggctgaaaagcaagcatcttcagcgagtgatgaccaaccaaatagctaatcgagattttgtatgtcttacacttgtgcccaggaagcagttgttgtagctcatgtggtaatggttcatgcaactgaaaatgagaaaacttgccctgcatgtgatctcttgatctagcgaaatcaaattcagaaaattgtcttggcatgtacagtcggttcatcatcatattgttatacaattatgcaacgtagatgtaatttgaatcttctgacg

SEQ ID NO: 4558 - DNA, 1143 bp, Triticum aestivum
atgttctgacctggatgacatatcatgcctggtgtacgtgatcaaaatggtaaccatgtaatccagaaatgcatagagtgcatccctcaggacgttatccagttcattgtctcaactttctatgtcaattgtgctgctatccactcatccatatggttgccgggttatacagaggtgttggagcactgtgatgatcccacaacacagcagataatgatggatgagattctccagtctgtttgcttggctggctcaagatcaatatggtaactatgttgttcagcatgttctggaacatggcaagccacatgagagaactgctatcattgacaagttaattgggcagattgtgcaaatgagccagcaaaagtttgcttcaaatgtcattgagaagtgcttagcttttggtaatcctgtagagcggcagattttgattggtgaaatgcttgagtctactactgaaagtgaacctcttgaggtgatgatgaaagatcagtttgcaactatgtggtgcagaaggtgctggagacttgtgatgatcagcagagagagatgatccttaccaggatcaaagcccacctgaacactctcaagaagtacacctatgggaagcacatagtcgcgcgtgtagagaagctagttgctgctggagagaagcgccaggggcttcaaccagcatgcaccgccgcctgaaggcgggactatgcagttgtacagctaacagtggctaggtttgcgctcgcgtttccccccaacaaccgaaaaccctataagatcgactagtaatggtaccggcatgaataagatacaaatcttggttgcactggagagagtgtacattctgtagctgaggaggcaaagactaatctgagagactaagctgtaaagaggaggaagagggtggagtaagtttgaacatgttactctgctcactgtacaaatttagcactagagaagtgagagaaagctgttagctgtcggaaaaatgtcgagttaaaagccgctgcgactactttgttagtaatcctgctgtgtgtcgtgtcgatagaaacaaaccatgatgatggcttgctgttgttgttgtaagataaaactcttttccgcagtttaagctgaagttattagtatcagctttgctgaccg

SEQ ID NO: 4559 - DNA, 645 bp, Triticum aestivum
tcatggtgtttatgtctaccgaggatccatcgaccctgcctgtatggaaggtacctgtatgctgacctttacgcatcagccatgtggactggcacggagaccccggagggcagtgggaactacacctccagtctcatctccttcagctgctccaagaactctcccatcccctgtgacagcgccgctgggagccctctcccgtcgctcggttacatatattccttcggcgaggataacaacaaggacatctacgtcttggcaagcaaaggcgtctaccgggttgtccggccgagcctctgcagctacacttgcccgacagagaaacctgagacgaacaatgggaaggcacccgcaggtccttcgtcgaacgcgccagcagcattgggaatgggcatgaaaatgggggctttgttgctgtctgctgtcactgccttgtttttgatgagataggaggatcctactacatcgatcatgtattggtatgccgtaagatcaatcctcacattttagcatgtattagcagtacaataataagtcagcatatttctttgtacagttaggagtatgaatcatgacacatggacctatgaggattagattctgaaaacttaatatcagttctgtatgagcatatacctcgttata

SEQ ID NO: 4560 - DNA, 1147 bp, Triticum aestivum
acggatggatacctctatctcatgatgggtgacggtggacagaaaggagatccttttaattttgcgcagaacaaaaagtcgcttctggggaaaattatgaggcttgacatcgacagtacgccgggactcggtaaagtcactaaccaaagcttatggggtaactattccattccaaaagacaacccgttctccgacgatagtggcttggcaccagaaatttgggcattgggcgttagaaacccttggagatgcagctttgatcttgacaggccttcctacttctactgtgcagataccggtcaggtatcatttcaggatcttaaaacagttctaacttgcgaggaccaatacgaagaggttgatttgatctccaaggccggaaactatggatggcgtatatatgagggtccattggtgtacaatccaccgtggacacctggaggaaacacatcactcaagtccgtaaatgtcattcctcctattatgggatacagccattctgacgtcaataaaaacattggatctgcgtcgatcatgggtggttatgtctaccgaggatccaccgacccctgcctgtatggaaggtacctgtatgctgacctttacgcatcagccatgtggactggcacggagaccccggagggcagtgggaactacacctccagtctgatctccttcagctgctccaagaactctcccatcccctgtgacagcgccgctgggagccctctcccgtcgctcggttacatatattccttcggcgaggataacaacaaggacatctacgtcttggcaagcaaaggcgtgtaccgggttgtccggccgagcctctgcagctacacttgcccgacagagaaacctgagacgaacaatgggaaggcacccgcgggtccttcatcaaacgcgccagcagcaatgggaatgggcatgaaaatgggagctctattgctgtctgccgccacgtttttgatgagataggaggatcctactacgtcgattatgtcttggtatgccgtaagatcaatcctcgcattttagcatgtattagcagtacaataataagtcagcaatatttgcttctacagttaggagtatgaatcatgacacatgggcctacgaggattagattctgaaactaaatatcaat

SEQ ID NO: 4561 - DNA, 496 bp, Triticum aestivum
ggcttcgtcgtgttcgtgaatgcatgggcgatcggcagggaccccaagttctgggacgacccggaggagttcaaaccggagcggttcgagaactccaaggtcgacctcaaggggacggatttcgagttcataccgtttggggctgggcgcaggctctgccctggcttggcgttcgggctggccagcattgagatcgtgctggccgtgctgctctaccacttcgactgggagctcccggacggggtggccccgagcgagctggacatgactgaggagatgggcatcaccatccgaaggaagaatgatctgtacctgcgtccaactgttcgtataaaggtgtaggttcttttttcgaaaaggagggtttactccgatctcggcctcttgcataataaacatgtgccgcatagttgccttgcaccgtcaatggtgacgggtttgcccgttgtactacctgtttatcatgacttgaataaaataagcatgaggtttgttc

SEQ ID NO: 4562 - DNA, 1187 bp, Triticum aestivum
cgccgccacgccgccgggagaaaccgtgaacctctgcgagcagatcttttgggtcatcgcggactcgacgatgcgcaccatgatcggcgagaggttcgagaggagggacgagttcctggtggtgttggcggacatcgtcaagatcgcatcgggtttcaccatggccgagtggttcccgtcatcgtggctcgtgcgcgccttcggtggcacgaggcggcgcggccacgcgggctaccttacgacctacgagctggtggagagcgcctaccggcagcgacagaagcgaaaggaggccatggctgcaccgtcgaccaggaaacgccgttgaacgggaagcaggaggacctcgatggcacgagctcatgagcgatacacgaggaaggtgacctcgaggtgccctctcaccattggcaacatcaaggctgtcacgatagatctctttggcgccgggaccgagacgtcagcagatgcactccagtgggcgatgtcagagctgatgaggaacccgagagtgatgcagaaagcacaggccgagctgcgcgacaaactcggcgggaagcctaccgtgaccgaggccggcctggccgacatgacctacctgaagctcgtcgtcaaggagaccctgaggctgcacccggcgctgccattgctcgttccaagggagtgcaacgagacgtgcaagatcatggggtacgacgtgcccaaaggcttcgtcgtgttcgtgaatgcatgggcgatcggcagggaccccaagttctgggacgacccggaggagttcaagccggagcggttcgagaactccactgtcgacctcaaggggacggacttcgagttcataccgttcggtgctggccgcaggctctgccctggcttggcgttcggactggccagcattgagatcgtgctcgccgtgctgctctaccacttcgactgggagctcccggacgggatggccccgagcgagctagacatgactgaggagatgggcatcaccatccgaaggaagaatgatctttacctgcgtccaactgttcgtataaaggtgtaggttctctttcgaaaaggagggtttacccctagcctctgcataataaacatgtgatgcatagttgctttgcatcgtcaacggtgacgagtttgtccaatgtactgcccgtttatcgttacttgaataaataagcatgagc

SEQ ID NO: 4563 - DNA, 496 bp, Triticum aestivum
acctgcccgtgctcgtcgacttcgtcggccgactggtgcgggccctgccgcctcgtcgcccccgtcgtcgactgggcctccgagggatatgaggggagattgaagattgtcgagatcgaccatgacgcgaatcctcagattatcgagaagtacaaggtttacggtctcccggcgttgatcctcttcaaggacgggcaggaggtgccagggagccgaagagaaggcgcgataaacaaggccaagttcaaggactacatcgagcctctcctggagacctcaaatgtggcctgatatcatcgcctgcggtctgcaggaccgattcttgtaatggttcacacttcagaggatgccaaatggcactggcttgagctgcacagcttgcatatcaaagagttttccccactccatcagctctagtctgtaattactaaattacctacacgatcaggactatgtatggctttcattgtatggaaaaaatattagcatatatgaa

SEQ ID NO: 4564 - DNA, 561 bp, Triticum aestivum
  N_region (18)..(18): n = any nucleotide
  N_region (22)..(22): n = any nucleotide
  N_region (27)..(27): n = any nucleotide
  N_region (35)..(35): n = any nucleotide
  N_region (46)..(46): n = any nucleotide
  N_region (50)..(50): n = any nucleotide
  N_region (78)..(78): n = any nucleotide
  N_region (169)..(169): n = any nucleotide
atgcagtcggcctgcccnttgntcctnacttcgtngccgactggtncggnccctgccgcctcgtcgcccccgtcgtcnactgggcctcctgaggaatacgaggggagattaaagattgtcaagatcgaccatgacgcaaatcctcaaattatcgagaagtacaaggttnatggtctcccggcgttgatcctcttcaagaacgggcaggaggtgccagggagccgaagagaaggcccgataaacaaggccaagttcaaggactacatcgagcctctcctggagacctcaaatgtggcctgatatcatcgcctgcggtctgcaggaccgattcttgtaatggttcacacttcagaggatgccaaatggcactggcttgagctgcacagcttgcatattgaacagtttttccccactccatgagctctagtctgtaattactaattacctacacgatcaggactatgtatggctttcattgcattggaaaaaaagagcatatatcaagggctatcaagaggatgtacacttatttaattgttattaagcaaggtcaatgaataa

SEQ ID NO: 4565 - DNA, 999 bp, Triticum aestivum
atttggttcgacgtatgttggaaccagatccaaagctcaggttaactgcaaagcaggttcttgagcaccattggcttcaaaatgctaagaaagctccaaatgttcctcttggcgatattgtcaagtcaaggcttaagcaattttcgagaatgaatagattcaaaagaagagctctaagagtcatcgctgatcatttgtcagctgaggaagttgaggatataaaggagatgtttaaggcaatggatactgacaatgatggcattgtttcttgtgaagaattgaagagtgggatagcaaaatttggctctcaccttgcggaatcagaagtgcagatgcttattgaagctgtggatacaaacggtaaaggagtactagattatgccgaatttctagctgtctctcttcatctgcaaaggatggcaaatgacgagcaccttcggcgggccttcttattcttcgacaaggatggcaatggttacatcgagccggacgagcttcgagaggctctgaaggatgacggagcagctgatagcatggaagttgtgaatgacatactgcaagaagttgacaccgataaggatggcaaaattagctacgacgaattcgtggcgatgatgaagacgggcacagactggagaaaggcatcacggcactactcgagaggcagattcaacagccttagcatgaagcttgtgaaggacggttccgtcaaattgggcgtggagtaaaagccatggtgtttatttgtgcatgtagttaggcatttgggccccactaagcagcagctcctttagtttttgtcatggtcgttttgcgtggaaatttagataggtggaaccccctctgattggctcacatgtgtaattagttctcctggatcagtggcagtcgcacgcacgcgctgacggatgtaccaagagcagtgcgcctgcttttctgaaccactgatgttaagtgttgtacaatgttttgccgtacacaaatacagtttctagattt

SEQ ID NO: 4566 - DNA, 656 bp, Triticum aestivum
caaccagtgctgcagccagtacggtactgcggcttcggcgccgagtactgcggcgccggctgccagggcggccctgccgcgcgcgacatcaagtgcggcagccaggccggcggcaagctgtgcccgaacaacctctgctgcagccagtggggattctgcggcctcggttccgagttctgcggcggcggctgccagagcggtgcttgcagcaccgacaaaccgtgcggcaaggacgccggcggcagagtttgcactaacaactactgttgtagcaagtggggatcctgtggcatcggcccgggctattgcggtgcaggctgccagagtggcggctgcgatggtgtcttcgccgaggccatcaccgccaactccactcttctccaagaatgatgatcaatcttgctatggcagtattgcaacgacgaataatccgtggcaatctcattgccacctacggtttcccttgacttacttttagagtactagtccttaataattctctagcttgcaatatgatgtgcaggttactgcagcagaaacaaaatattgctgtcgtgcatgcatggaaatattgcagtgagaaagtactgtgtggcaatatagggtgtgctattgttgccgcaaattagttttcttgttatgacctgttgtcagga

SEQ ID NO: 4567 - DNA, 650 bp, Triticum aestivum
acctcgtcaagggtgacgacgaggccgcacttccgccggagttctctgcggcgatcgaaggggcggagcatgctctcgaacgtggtgcccacaggagaaaggtgctagagcatgaggctgtaggggtgtttctcacacactccggttggaactcatcgctcgagggcatctgcggcggcgttccgatgttgtgctggcccttcttcgcggagcagcagaccaactgtcgctataagtgcacggagtggggcatcgggatggagattggggatgatctgagaaggaccgaggtggaagccatgatacgggaggtcatggagggggagaagggccgagagatgcgacaacgcgtgattgagctccagaagagtgcagtggcctccgcacggcctggcggaaggtccatgcgcaatgttgataggctcatccacgaggtgctgctggcttgaaataagcaaattaaagtagtaaataaatgttttggagagcctgaagcacgagcgactcatgttgttcacccgctcacaacaaaataatcaatcccaagccaatgagcatggtcatcacactctagcacagggctttcatgggcccctccctacatcatcttgtaattctgtggacttgtaatgatgatgagcacctccgtc

SEQ ID NO: 4568 - DNA, 824 bp, Triticum aestivum
ggcggccatgtcacaggcctcggcggtggtcatcaacacatgggacgagctcgaatcacccctgctcgacgccatgtccaaactcctgccgcctatctacacagtggggccgctccatctcacggtccgcaacaacgtaccggaggagagccccctcgccggcattgggtccaacctgtggaaggagcaggacgcgccccttcggtggctcgacggtcggccgccgcgctccgtggtctacgtcaatttcgggagcatcacggtgatgtccaaggagcatttgttggagttcgcatgggggctggccaacacaggctacgccttcctgtggaacgtgcggcctgacctcgtcaagggtgacgacgagaccgcgcttccgccggagttcgctatggcgatagaggggcggagcatgctctcgacgtggtgcccacaggagaaggtgctagagcacgaggccgtaggggtgtttctcacgcactccggttggaactcgtcgctcgagggcatctgcggcgctgttccgatggtgtgttggcccttcttcgcagagcaacagactaactgccgctacaagtgtacggagtggggcatcgggatggagattggggatgacgtgagaaggaccgaggtggaagccatgatacgggaggtcatggagggggagaaggggcgggagatgcgacggcgcgggattgagctccagaagagtgcagtggcctccgcacggcctagcggaaggtccatgcggaatgtcgataggctcatccacgaggtgctgctggcttgaaataagcaaattaaagtggtaaataaatggtttg

SEQ ID NO: 4569 - DNA, 959 bp, Triticum aestivum
ttgacataggtaaccaggacagcccctggaagcgccgtatgctctgatataccgaaacatcgcgattcttggtgtggagggcttctctgctctgcccatgcattgcttgcagctttgctgtggattctttgcctttgcactggtggccaacctgatgagggatttccttccacagaagtatggcaaatgggtccccttgcccatggcaatggggttccccttccttgtcggcgcgagcttcgccatcgacatgtgcgccgggagcttgatagtctacatcttgcacaagattgacaggagcaaagcagcacatatggtgccagcagttgcctccggttttatatgtggggatggactttggatcttcccagcttccttgcttgcgttggccaagatcaccccaccaatgtgcatggcatttgcttctacacactagatgggtatcatgcccgatagtggtcgctggctcgcagctctatggtgaataagttgaatgatatataaatccacaaggtgtaaaattgtaagaggtatatcatctttcaagagcagcagatcccattgccaaatgtgggtttccagctgttctctgcaaatgttatcatcggatataaaccatcaaatgaagagttgtcaagtaatgtgtataaactgatgagggtaagactggggtatgaagatagatgagcccactcgacaggattaccgcagcgatgaattactgtatgctgcagcaggaaaacatcatgagtttctgaaaaccatccagcaaattcagtcctgcttagtgcttaccactgaacactgaagacaaaattaggcctatatattactgtgtaattatcttcctgtggtgattattttctttagtgagaagtccctatctatcagtttatgtatgtgcatatctcaaaaaaaaaagtttatgtatgtgcaggagacacgattctcagaataaa

SEQ ID NO: 4570 - DNA, 554 bp, Triticum aestivum
  N_region (386)..(402): n = any nucleotide
agatcaagtctggtccaacgacgcagtcaccttccaggagatcacggaggacccgaacatcgacccaccggacctggtggtggacaggataatgatgaggcagcaggtgcgggagttcctgggcatcctgagcacgagggagaaggagatcatcgagcaccgcttcgggatctacgacggcgagcccaagacgctccacgtgatcggcgacatgtacggcctgtccaaggagcggatccggcagctccagaaccgggcgctggacaagctgaagcggagcgtgtccacgcaggggttcgacgtctacttggacctgctgacctcgagtggctaggcagcgcctcattttctctcggttcgattgttcatacacaagggaacacacnnnnnnnnnnnnnnnnngcctaagaagctagaaccccactgacatcctagaactgaagcagagaaacacacagcacactttcagagtttcagtggcatgcttttttgccgggtgtaagtacaaatttcgcagcaagctggtggtacatactacatacatactgatactg

SEQ ID NO: 4571 - DNA, 739 bp, Triticum aestivum
  N_region (572)..(590): n = any nucleotide
gcattcgagactgattcggttgccggagagtgtgaatgcacgtctgaaaaaaggtggggaaacaaggctggagtgcatcttggaaggggagcagcctactaacccaaatgtagctaggcggccggcatcacgatcgagaagctggcgaaactcaaagcaaagaccagaaagccacgatcaatgcaggatcaagtttggtccaacgacgcagtcaccttccaggagatcacggaggacccgaacatcgatccaccggacctggtggtggacaggataatgatgaggcagcaggtgcgggagttcctgggcgtcctgaccacgagggagaaggagatcatcgagcaccggttcgggatctacgacggcgagcccaagacgctccacgtgatcggggacatgtacggcctgtccaaggagcggatccggcagctccagaaccgggcgctggacaagctgaagcggagcgtgtccacgcaggggttcgacgtctacttggacctgctgacctcgaatggctaggcagcgcctcattcattctcggttccattgttcatacagaagggaacacacannnnnnnnnnnnnnnnnnnagcctaagaagctagaaccccactgacatgtgcaagcctcctagaactgaagcagagaaacacacagcacactttcagagtttcagtggcatgcttttttgcagggtgtaagtaaatttcgcagcaaagctggtggtacatactcatac

SEQ ID NO: 4572 - DNA, 521 bp, Triticum aestivum
actgatgattctgtggtggcaatagctagcgggtgtccgttgattgaggagtggagccttgctgtctgtcatggcgtccgcttacctggttggtcggcgattggattgaactgcaacaagctaagaattcttcatgtgaaccgttgcagaaacatatgcgaccaaggattgcaggctctcaaggacggatgtgtgcgccttgaggtcttgcatatacatggctgtggaaagattacaaataatggcctggcactgttcagcattactaggcctagtgtgaagcaaatggtggatgaagccatgtccattggcccctccatcgaggatttattccggttgcagtgatcggggaactctgaaagtttagttagaactttgaagttttgacttgagcaaggcgccagcccttgttgtcaccagtgtgtttgtcattacagcaaggtgattggttctttgaccatcaccatgtgtgcattctatttgttccggttcatacttatttggttgatgatgtagaggat

SEQ ID NO: 4573 - DNA, 757 bp, Triticum aestivum
actttcttacctagaagccgagtcctgcatgctttcttcagagggaatgctagacatatcgagtggtggtggactccagtacataaatttgtataatctaaggagttcagctgggctggattgcctaggtggagttggcagtatgaagaaactccgagttctgaatctgaggatgtgccgctatcttactgatgattctgtggtggcaatagctagtgggtgtccgttgatcgaggagtggagccttgctgtctgtcatggcgtccgcttacctggttggtcggcgattggattgaactgcaacaagctaagaattcttcatgtgaaccgttgccgaaacatatttgaccaaggattgcatgctctcaaggatggatgtgtgcgccttgaggtcctgcatatacatggttgtggcaagattacaaataatggcctggcactatttagcattgctaggcccagtgtgaagcaaatggtggacgaagccatgtccattggcccctcaatcgaggatttattccggttgcagtgaccgggaacttggaaattttagttagaatttcaaagttttgacttgaacaaggtgccagcccttgttgccaccgttgtgtttgtcattacagcaagtgattggttctttgccgtcactgtgtgcattctatttgttccggttcatacttatttggttgatgatgtaaaggatgttgccgatagaaccataactatacaaatgaactgtaagaagtcagtttggtgc

SEQ ID NO: 4574 - DNA, 834 bp, Triticum aestivum
acgccaaccacgacacgctggtggcggcgctgcgcaggaacgggttccccaacgtgaccgtcgtcgtcggcgaggtcggctggcccacggacggcgacgccaacgccaacccggcgtacgcgcagcggttcaaccagggcctcctggaccacgtcgcctccggcaagggcacgccgctcacgccgggcgcccccgtcgacgcctacctcttcagcctcgtggacgaggacaggaagagcatccagccaggcaacttcgagcgccactggggcatctttttctacgacgggaagcccaagtaccagctcagcctccgcggcaatggcggcggcatgcttgtgccggcgaggggcgtcgagtacctccagaggcggtggtgcgtgctcaagcccgacgccgacctcgctgaccagaaggtcggcgacagcgtcagctacgcctgcggcagtgccgactgcaccagcctcgggtacaagacctcgtgcggcggcctcgacgccaagggcaacgtgtcgtacgcgttcaacagctactaccagaccgaggaccaggacgaccgagcctgcgacttccgcggactcgccaccaccaccaccgtcgacccctctaccgggacgtgccggttcatcatcgggatcgccccgaccagcacggcgacgaggaacgttgcggccaggacagcggccatcttcttcgcgctgttgctcgcaggcatgttctgaattcaggattgtggtcgatgcttcattagtttagtggtcatctttcaacttttcctttttcttggcagaaatagttgttcatcttgattgaatgattgtcgattgtcttctg

SEQ ID NO: 4575 - DNA, 795 bp, Triticum aestivum
aagcaagcattgagcaatcgaacatggcgaggcttcacctttccgtcgtggcggcctgcgccgtcctcctcgcgctcgccgccccctccctcgccggcgacgccgacatgctccaggacgtctgcgtcgccgacctcgcattcccaatcaagatcaacgggttcccttgcaaggccaacatcacggccgacgacttcttcttcgccggactcaagaaggccggcaactacctaactaacccggctggttcggtcgtcaccgcggctaacgtgctgtcattccccggggtgaacacgctcggcgtgtccatggcgcgcatcgactacgccgtgggagggcagaacccgccgcacacccacccgcgcgccaccgagatcattttcgtcaccgagggaaccctggaggtgggtttcatcaccaccgccaacaagctcttcactaaggtcgtcaccgtcggagaggtgttcgtcttcccgacgagggctcgtgcacttaccacgcagaaacaggggcaactgctctgcactcacgtaaatcgccgccttcaacagccaagcattacaagggcaaccacaagccatcgccaaccaacagcatacatatagagacatagccaacaaccaccagtgccaaccgacgatagactggacaaaggcaattacagggattgataaacgaagaacaatacagaacgcacgtaaaggaccaggttcaaatagggagcctcatgccactacatggcaacatccagcatccatttcggaagaaaaataaatcgtcatgtattgatacatg

SEQ ID NO: 4576 - DNA, 442 bp, Triticum aestivum
ctttgtcaccgagggaactctggaggtgggattcatcaccacggccaacaagctcttcactaaggtcgtcaccgtcggagaggtgtttgtcttcccgcgtgggctcgtgcacttccagcagaacaggggagactgccccgcctccgtcatcgccgcctttaacagccagcttcagggcacccaggccatcgccaccacgctcttggctgccacaccaccggtgccgacggacgtgctggccaaggccttccgggtcgataacgaagacatcgacgccgtcaaagcaaggttcaactagggagcctctgctgtcggcagctctccatccgtttcggaagaaaaaaaatcgtttgtttgttactgaataaatggtaatcaagtcatcaagtgagctgtagcgtgtagttgatttgttgttgtgtatgttacatttgttgctctt

SEQ ID NO: 4577 - DNA, 696 bp, Triticum aestivum
gaggtttgtgatgagcatcgttgggttctacatcattgccaaatgagctggttgcactgttggttgcattttggagtgatacttggaattaatccgtcaatccttgggttaacggtgttagcatggggcaattcgatgggcgacttgatgtcaaatgtggccttggcaatgaatggaggagacggtgtgcagattgctatgtctggctgttatgctgggcctatgttcaatacacttgccggcttaggaatatcgatgctgcttggagcttggtcgacagcacccaactcttatgttcttccgcaggaccgctctcttatttacacgatgagcttcctggttgctggattgatctgggcacttgttacgctgccacggagcggtatgcggcctaacaagacgcttggggttggcctcattgttctctactcagttttccttttcattagagtaagcagtgctatggggatattgccactcccgggcttgaattagttgtttgtgtctattgtacatgactgtcctgtatacagatgaaatggggttgtacattgttcctctgttctgttgttatgcctcaaatttggttgtatgcctgtcaggctttcagagacaataaagccagagcatgcctgcaactggtctacttatttgtaagcttaatcacctttcatgctgatagcataatctaaactt

SEQ ID NO: 4578 - DNA, 699 bp, Triticum aestivum
ttttggaggttttgttatgagcatcgtttggttctacatcatggccaatgagctggttgcactgttggttgcatttggggtgatacttgggattaatccttcaatccttggcttaacggtgctagcatggggcaattcgatgggtgacttgatgtcaaatgtggccttggcaatgaatggaggagacggtgtacagattgctatgtctggctgttatgcagggcctatgttcaacacacttgccggcttaggaatatcaatgctgcttggagcttggtcgacagcacccaactcttacgttcttccacaggaccgctctcttatttacacgatgagcttcctggttgctgggttggtctgggcgcttgtcacgctgccacggagcggcatgcggcctaacaagacgcttggggttggcctcattgctctttactcagttttccttttcattagagtaagcagtgctatggggatattgccactcccgggcttgaattagttgtttgtgtctattgtacatgaatgttgtttatacaaatgaaatgagttcctctgttctgttgttctcatgcctcaaatttagttgtaggctgtcaggtgttggaggcaataaaccagagcttgcctgcaactggtgtacttatctgtaaacttatcaccttgcatgctgatagcaataattttatacttctgatgttg

SEQ ID NO: 4579 - DNA, 806 bp, Triticum aestivum
gccgtcaagccccgcaagccccagttcgacctcaaccaggtcgccgtccagtacctcctcgtcgccccgccgtccccggccgcgtcgccgaacgtcgccgcgggccccgccggcgcctacctctccctcaacatcacgctcctcttcaccgccgtgaaccccaacaaggtgggcatccgctacgccgccacggcgttcgacgtcatgtaccacggggtgccgctcggggtggcggccgtgcccgggttcgagcagcccgcgcacagcacccgcctgctccagacccgcgtcatcgtcgaccgcttcaacgtcctccagtccgacgcccaggacctcatccgcgacgccgcgctcaacgaccgcgtcgagttccgcatcaccggcgacgtcgccgccaagatcctcgtgctcggcttctcctcccccaaagtccaggtgtcggtggactgcgcgatcgacatcagccccaagaggcagtcggtgacatacaagcaatgcggcgtggacgggctaagcgtgtaggcagcaagcgaaccaaaccaacctcgccgccgccgcaacaccgcagaagcggaggctactggtattaatctagtggggatagatatatgtggatgggaatctgtacgtcgattctagtctctaatctcgggttttgattcctttactgcgcgtggggccgggtaaattttgagctctcacctctcctcgccttagtaggttgaggttaccactgattcttgtgaattattgctggatgccattagcagtgagtatataaatcagtcgccatggttcttccatgg

SEQ ID NO: 4580 - DNA, 668 bp, Triticum aestivum
catagcatatggaagcgcggggaagcaactgaagaagagatatcaccgtggccagcgcccaacgctcatgagttcatatcgagcttgcctcagggatacaacaccaacgttggtgagagaggaacacaactatctggtgggcaaaaacaacgggtagctattgcaagggcaatcttgaaggaccctcgggtacttctgctcgatgaggcaacaagtgcctggacgctgaatcagagcgcagtgttccaagatgcattggacaaggtgatggtgagcaggaccaccattgttgtagcacaccgtctctcgacaatcaaaggggcggatacaatcgcagtgatcaaagatggttcagttgccgagaaggggaagcatgaatcgctcatgggcatcaagggtggagtctatgcatcgctggtcgagctacactcaaaggcgtcagcgtcataaaagggtgtgtgcagatttatatcgttcagatctttttcacaactagtagaagataaagactgcattgtgtattttgtattagaagtcgtgtgatgtaaatgtacggaaattttaagccaatcgcctgtaattcttgttttggcttggcctaagacatcagaggtaagattgcctcagcatagcatctgttttagttgttctagctactgcagattgcc

SEQ ID NO: 4581 - DNA, 753 bp, Triticum aestivum
tctatgatccagactctggcacatctcactagatggaacagaactcaaaacttaacactgagttggttaagagaccagatggggctggtaagccaagaaccagtgcttttcaatgacacgattcgtgccaacatagcatatggaaagcgtggagaagcaactgaagaagagattatcaccgtggccaaggcggccaacgcacatgagttcatatcgagcttgcctcagggatatgacaccaacgttggcgagagaggaacacagctatctggtgggcaaaaacaacgggtagctattgcaagggcgatcttgaaggaccctcgagtacttctgctagacgaggcaacaagtgcctggacgctgaatcagagcgtattgttcaagatgcattggacaagataatggtgagcaggaccaccatcgttgtagcacaccgtttgtccacgatcaaaggggcggatacatcgcagtgatcaaagatggttcagttgcttagaaggggaagcatgaatcgctcatgggcatcaagggtggagtctatgcatcgctggtcgagctacactcaaaggcgtcagcgtcataaaagggtgtgtgcagatttatattgttcagatctttttcacaactagtagaagacgaaaactgcatcgtgtattttgtattagaagttctgtgatgtaaaatgtacggaaattttaagccatcgcctgtaattcttgttttggcttggcctaagacatcagaggtaagatt

SEQ ID NO: 4582 - DNA, 563 bp, Triticum aestivum
ggagacgctgcggctgcactccccgatcccgctcctcgtcccccacatgtacctggaggaggccagcctcggcggctacaccattccctagggctccaaggtggtggtcaacgcctggtggctggccaactacccggagctatgggagaagccggaggaattcaggccggagaggttcttgggcgaggagagctacgtggacacctcggtcggcggcggcaaggtggacttccggttcctcccgttcggcgtgggccggcgtagctgccccggcatcatcctggcgctgcccatcctggcgctcatcgtggggaagctggtgaggagcttcgagatggtgcccccgccaggcgtggacaagctcgacgtgagcgagaaaggcgggcagttcagcctgcacatcgccaaccattccgtcgtcgccttccaccccatcgtctcaccatgaccaattacttcaaccgaaagcctacacggctacacggctacacgcacaattactcttcatcagggattacaaagtaatgtctagtactcagatcggatcagctgatgcagcgcaa

SEQ ID NO: 4583 - DNA, 605 bp, Triticum aestivum
aggccgtgatcaaggagacgctgcggctgcactccccgatcccgctcctcgtcccccacatgaacctggaggaggccagcctcggcggctacaccattcccaagggctccaaggtcgtcgtcaacgcctggtggctggccaacaacccggagctatgggagaagccggaggagttctgcccggagaggttcttgggcgaggagagcaacgtggacgccacggtcggcggcaaggtggacttccggttcctcccgttcggcgtggggcggcgcagctgccccggtatcatcctggcgctgcccatcctggcgctcatcgtggggaagctggtgaggagcttcgagatggtgcccccgccaggcgtggacaagctcgacgtgagcgagaaaggcgggcagttcagcctgcacattgccaaccattccgtcgtcgccttccaccccatctcagcatgagcaattacttcttcaacccaaaagcctgatccacatgcacaattactcttcggattacaaatacagtactactagattacaggaaagtatgtcagttgatttaaggggtttacattttttcttttaaaaaaggaggatcacgcgtggcct

SEQ ID NO: 4584 - DNA, 709 bp, Triticum aestivum
cttataaaaagagcttcaaaatgaacaatggaacacgcaatggaagagcaaggtttttgtaaatggtttccctatcccagaccgtgcagtcaggaagctgagaaagttagctggaccatatatcctggtgattactggtatgactaccgtgctggcttctgggtttgtcggtcagccctgccttggcatgatacctccttatattccagagtttaattaccctatgcccaagaattgtggtggtggaaacactggcatttatatcaacggaagagaactccaccagaaggatttggatttacttgtatctcgaggactctctgattcccctgaaagatcttatatagttgaaaattctgggaaagttacagatgaagcatctggcgaagagctatatggccttggcaagcttgcaccaaccgtcgagaaattgaggcgcggatttggtatgcgagtccccaagttatcgtgacaggccagcacgctacgatcatcacccacggataagctcggggataaaccagtggcgtagctgcatccgagaacatggagatttgaagatcaatggcggtcgttctgatttccagaaattgttttcagctccatcctatgtggcctcctggctagttcttgtgcttgttggattgtttatccgaggcctcctatagaggcgtgcttgtaagtttcttcctagctagacgttttgagt

SEQ ID NO: 4585 - DNA, 741 bp, Triticum aestivum
gcaccacttggacatacgacactgaacatgttcatttccctccatgggttcataccacaacaggttcaatggcatggacgcgggccaggatcaattggatgtggaccagctccgccagacgtacgagaccgcgaaacagggcctgcagacaactactacggcacgaagcgggtgacggaggctctcctgcccctgctccgatcctcgtccgacggaaggatcgtcaacgtctcctccaacttcggattgctcagctttttcaggaacgaggagctgaagcaggagctgaacgacgtcgacagcctgaccgaggagaggctggacgagctgctggccatgttcctcaaggacttcgaggccggcggcgcggaggcgcgcgggtggccggccgagttctcggcgtacaaggtggccaaggccgccatgaacgcctactcgagaatcctggccaagaggcacccggagctgcgcgtcaactgcgcgcaccccggctacgtgaagacggatatcaccaggaactccgggatcctgacgccggaggagggcgcgcgcaacatcaccagcgttgcgctgctgccggaaggcgggcccaccggcaagtacttctccgaaggcgaggaggcatccttcgtgtgaaagagcatctgtagtactactgttttgttgcgcttatctgtggtgtgtggtgggataatctgcaaagtcgagttcaaaaaaaggaataaagttacgttagtttgg

SEQ ID NO: 4586 - DNA, 356 bp, Triticum aestivum
tcagaaaagcaggcacaacagctaaacagatcaatatggaaggcgagttcggccatctcatccaacagcagtatgctggacagcacgcacacagctatcatgccgagctctcttgataacctcctcctgaattcgaacacgagtttcttgtacaccggtaagccgccgaagcacggtggagcacccgacagcattgtcgacgggtgggatatggtagagcgtgagatcctgccgccgccgccgtcccagatcgaagacatcgcgcagtgggaaagagcccacacctacgcccgcagtggttctaaaaagaaatgacttgcataatgtaagcttttagaacaccgcaagaagcttca

SEQ ID NO: 4587 - DNA, 994 bp, Triticum aestivum
  N_region (56)..(56): n = any nucleotide
  N_region (772)..(795): n = any nucleotide
agcggagtagctactggagcacacgacaatcccagagcaaggtttacccacttttngtgccaaggcaaaataattgttctgttcggagaggaaaattcatggacagaaagtggttcgggtaactttggtgttgattctgtggactcggatcagaaatccctttttgactccaagagaagcaatagcttcaacttctcagccgcatcttctcactccattgagaggcatcaagacttgcaaagagggatatctttgctaaagacaagtgtttctgccatcactgcctactactataactcattgggcttggatgtgccacccaatctttctacttttgacgcatttgcaaagatgctccatatgttatcatcttcaaagacccttcgagctgctcttgaatcaaatatcgcctcaagatcagaaaagcaggcacaacagctaaacagatcaatatggaaggcaagctcggccatctcatctaacagcagtatgttggacagcacgcacacagctatcatgccgagctctctagattacctcctcctgaactcgaacacgagtttcttgtacaccggtaagccgccgaagcacggcggagcacccgacagcattgtggacggctgggacatggtagagcgtgagatcctgccgcccccgccgtcccagatagaagacatcgcgcagtgggaaagagcgcacacctacgctcgcagtttctaaaaagaaatgacttgcataacctaagcttttagaacaccgcaagaagcttcannnnnnnnnnnnnnnnnnnnnnnntggatggatgtctgatcatatggttttggtttgtgtatgtatagaagaaagctaaccatggcctatgagttatgcagaagagaagggcattgtagggtagaactgatcagctctgcccccctgtacagcacctgtaatttgtaaatatacctgtatggctgtatacatagcatttactggcaatgaataaatatataca

SEQ ID NO: 4588 - DNA, 791 bp, Triticum aestivum
ccccccagcgcgtcaagatgaattgccagatcgtcgaccccccctcgtccgctcaagctgtgtgccccgtcctcttcagacagagatgacaattcgtctgccatgaatggtttctggtcatgtgcttaccgagtggaaagcgcccccagttgggaaagtgcaaccgcttgaaggacagctctcgcgattttgcccccagaaggttattcctttgtggaatcacagagccacacgggatatgctatcgttgagtttggaaaagactatgcttgcttctgcacgccttcaagtttgaaaatcacttcgaggcggaaggatatggcaacgggactgggaggcacgcaggtatcgagggtcgaagatgtttggatgggttgcaagggctgatgatcaaagaactctggggccaatcggggagcatctgcaaaaaaatggtgatttgaaaactgttgcggaacttgagaatgaaggaacacgcaaaaccgacaaactggtagctaatttagccagccaaattgaggtaaaggccaagcatgtccaagaacttgaatgcaagtacaatgagacgaccaactcacttgacaaggtgatggaagaaaaggagcaggtcctccagagatacaatgatgaaatacacaagatgcagcaacttgctcgtaagcattctcagatgatcatcaatgagaatcagaggctccgttcagaactggagtccaagatgcaggatctcgaaataaaatccaggcagcttgatgaacttgctgtgcgtagtgactcagacagaaggaacc

SEQ ID NO: 4589 - DNA, 626 bp, Triticum aestivum
ggcttcaacacgcttccaagaactgcctgactctctgctacatcttcttcgccgcggctattgccatcaacctgataagagacttgacaccgcacaagttttcgaggttcatcccgctccctatggcaatggccatacctttctacatagggtcatactttgcgatcgacatgttcctgggcagcttcatactctttgtgtgggagaaggtgaacaaggcaaaagcagatgccttcggacctgctgtcgcttcagggttgatttgtggggacgggatctggaccctgcctcagtccattcttgcccttgccaaggtgaatcctcccatttgcatgaagttcttgacaagaggagacaatgtcaaagtggacaaattccttggtggctagtcatggtcttctacggaggacaagggacaacggcaagccacggccacgcatcagcatcagcatgtaattacagccacttcccaggccacttgttttgtagaaaagccagaacttgggtccatgcaagggagaattatccctacgaatcaagtttccgaaacgattgtagctgttccttcacaatgtaaaaaggaagaggaaaaactttagaggcagaacgacatattaggtgtagca

SEQ ID NO: 4590 - DNA, 617 bp, Triticum aestivum
ttctgtgtggtataatgttctgctccagtagtggcgaactacaccggcaatagctgcggggcctccaccatgaccggagccagacctaaacctgccgtcgatcaccatagccgtgctcaaccagtcgagaatagtaacacgaacggtcaccaacgtggcgagcgacgagaactacacggtcagttgcaacgccccctacggggtggcggcgtctgcgacaccggctcagttcttcatccccagcgggcagaagcagctcgtgacctttgtcgtgaacgccaccatgaccaactcttcggtgagcttcggggacgtcgagttctacggggacaaaggtcaccgggtggtcattccgttcacggtcatgtccaaggctgtgtagagttcccgataactgaaaagctgacactgaaacggtgtcctgactgatcaagccatcaaggttgtatacgcagcggtgacctgactgctttggaggtagaatgaccaggatttaccctagttgttttgtttggtgtacattttgaagcatgtcgtccatgtaagtagatgcgtggctaggtgaacaataactgtaaagagaatgtgtatcagaacgcccgtctttcgatgaatga

SEQ ID NO: 4591 - DNA, 705 bp, Triticum aestivum
acatggggaatgggtttccatgccactgctgctttggaccctgggctcatatttgatgcaattacgatgactacctctcctttctgtgtggtataaatggctctgctccagtagtggcgaactacaccggcagcagctgcagggcctccaccatgaccggagcagacctaaacctgccgtcgatcactatagccgtgctcaaccagtcaagaacaataacgcgaacaatcaccaacgtggcgagcgacgagaactacacggtcagctgcaacgccccctacggggtggcggcgtccgcggcaccagcacagttcttcatccccagcgggcagaagcagctcgtgaccttcgtcgtgaacgccaccatgaccaactcttcggcgagcttcggggacgtcgagttctatggggacaggggccaccgggtggtcattccgttcacggtcatgtccaaggctgtgtagagttcctgataactgaaaagctgacgctgtaacggtgtcctgactgatcaagccatcaaggttgtatacgcagcggtgacctgactgctttggaggtagaatgaccaggatttacttactcgtagctgttttgtttggtgtacattttgaagcatgtcgtccatgtaagtagatgagtgggctaggtgaacataactgtaaagggaatgtgtacgaggacgcccgtcttttgccgaatgag

SEQ ID NO: 4592 - DNA, 663 bp, Triticum aestivum
  N_region (16)..(16): n = any nucleotide
ggcgccaacgttgganaaggtgcccgggctcaacacctttgggcgtctccatggcgcgcatcgactacgcgccgggcgggctcaacgcgccgcacacccacccgcgcgccaccgagatggtcttcgtcctcgagggcgccctcgacgtcggcttcataaccaccggcaacaagctcgtctccaagaccatcggcgccggcgacgtcttcgtgttcccgcgcggcctggtccatttccagaagaacaacggcgccggccccgcctccgtcatctcggccttcaacagccagttccccggcacgcagtccctcgccatgacgctcttcgcggccacgccgccggtgcctgaccacgtgctcaccacggcgttccaggtcggcaccaaggaggtgcagaagatcaagtccaggctcgccccgaaaaaggcctgactaaacaatgcttacgtactgctcctgagatgtttccttcgagtgatgacatgattcattcaatccctgatttgtatttctactcacttttacttacctgcgttgttttcttgatttgttggatcctcattgtgtaatgctgccctggagcagcaagtacaaaagtggtaggtctgtgctgcttgtaataataagaccagtcatttgttggttctaaatctaatcattccac

SEQ ID NO: 4593 - DNA, 662 bp, Triticum aestivum
acgacgtacgctcggtggtgaccggcgccaacgtggagaaggtgccccgggctcaacaccctcgggcgtctccatggcgcgcatcgactacgcgccgggcgggctcaacgcgccgcacacccacccgcgcgccaccgagatggtcttcgtcctcgagggcgcgctcgacgtcggcttcatcaccaccggcaacaagctcgtctccaagcacatcacggccggcgacgtcttcgtcttcccgcgcggcctggtccatttccagaagaacaacggcgacggccccgcctccgtcatctccgccttcaacagccagttccccggcacgcagtccctcgccatgacgctcttcgcggccacgccgccggtgcccgaccacgtgctcacagcggcgttccaggtcggcaccaaggaggtgcagaagatcaagtccaggcttgcacccaaaaaggcttgactaaacaatactgagcactcctaagatgtttccttggagtgaggacatgattcaatccctgatttgtatttctgctcacttttactcacctgcgttgtttttctggcttcttgatttgttggatcctcattgtgtaatgctgccctgcggcagcaagtacaaaagctcgtgggcgctgcttgtaatgcaataataagatcactcattt

SEQ ID NO: 4594 - DNA, 880 bp, Triticum aestivum
attaaaatgaactgggaaagtgaaatcagaatctcagagatcacacaatctatgtacggtgccgtccatatctgaaagatttcctggagagagtagccagtatgtttgagataatcatcttcacggctagtcaaagtatctatgcagaacaactacttaatgttcttgatcccaaaagaaggttgttccgtcatcgagtgtatcgtgagtcttgtgtctatgtggagggcaactacttgaaggatctatctgttcttgggcgtgacttgtctcgtgttgtcatagttgacaattctccgcaggcctttgggttccaactagacaacggcataccgatcgagagctggttcgacgacccaaacgacaaggagctactagcactgctgccgttcttggaaagtctggttggggtggaagatgtccggccattcatcgcaactaagttcaacctccgccagaaggtggccagcgcgacttccctcgcgatgcacttctttcctaacgcggagcgtgccaactgaagcgttcccacagaaaacaggcgatcaagtgctcgaaaggatatctgaaattcggaatcctttgttgtcgtggtacactcatgtgtcatttaatttcgaaccgccagagagacggatgtataatttgggttattgtatctttctaaaaaccggtaatctttagggaaccttgtacaagcagtagccagacccagaaggggttgtcagtcgtgaccgcgttgcgcgatggatgcgccaagcattgtaataggtcagcagatatttgtcggaatttgttgtgctcactgaagttgtgttgcagcatgtagtttccaagtagagtacacaagtcagtcagtgaggattatagctgccaattg

SEQ ID NO: 4595 - DNA, 1303 bp, Triticum aestivum
acggaggcggtggacgggcggcggagctcaaggaccaggggaacgagcagttcaagtcggggaactacctcaaggccgccgcgctctacacgcaggccatcaagctcgactccgacaaccccaccctctacagcaaccgagctgctgcatttctgcagctggttaagcttaataaggcacttgctgatgctgagacgacaataaaactgaaaccagaatgggagaagggttatttcaggaaaggatgtgttttggaggccatggagcagtatgaggaggcaatatctgcttttcaaatagctttgcagcacaatccacaaaatacagaagtcgcgagaaagatcaagaggcttactcagttagcaagggaacagaagcgagctgttgatgtggagaacctgcgttccaatattgacattgggaagaacttgcagtcattgaaaaaggagctggttacaagtatggagatgcaaaatgggacaaatatattctcatttgttatcagtgtgattgaatcagcgataaaggtttggcatgacacaggaaaggtggatgctaaggtcgattttcttcttgatgatcagaagactgacactgaaaaatatgccccagtggttaacattgagaaggcctttgagtcaccccatacccatggcagttgcttcgcatatttgcggcaatactctgaggagtctttttcaaaggctgcctgtatggtagcacctaagagcatcatctcctatccacaggtctggaaaggtcaaggatcaagaaaatggaagcttgaccagagtgatgggttctttgtacaatttgaatcaccaattttacggaagatatggtttgttgctagcacaacagagaagggacgagcattgtgcaggagccctgagcccttggacattaccatccacgagatccttcctcgtatattcaaagagaacgaagctactgcttgatatctttccaaagcagatgcacagtcgacgacgtcttctttattctactacccctgactgcgtgatccgtattggcggtttatggttgaaaaggggggcaggtattttctcacacaggaagaactgaaatgccatatatcttgtaaaccgacgaccctgtgttggtgtcgtgtacacccaggcactccaattttgttgctgtgtggtttttcgctgtatgcggtgtatacaagctttggtggggttatgctggttgcatttctttgatttgtagaaggaaaagatatgttggagtataacactagatgcttgtgctcagattttattttgtggcttctggctgg

SEQ ID NO: 4596 - DNA, 679 bp, Triticum aestivum
cggctcagccgtgacaccggcgaaccgtggagaagctcccggggctcaacacgatggggcgtctcccatgtcccgcgtggactacgcgtcctggggccgtgaacccggccgcacacccaccccacgcgccaccgagatcatctatgtgcttgagggctccctcgacgtcgggcttcagtcaccaccgccggcaagctcttcgcccgcaccgtctgcaagggtgagcttttcgtcttcccccgcggcctcttacactaccagaagaacaacggtgacgcgccggccgtcgccatatcggccttcaacagccagcttccgggcacgcagtccctcgccctagcgttgttcgcagcctcaccaccggtgcccacggatgtgttggccagggcgctccagatcgacggcagcctggtggaggccatcaagtctaagttcccgccaatgtaactagcatgcatgcatgatgtttgttgggtcggctctacgtgcgtacgtgctgctaataataatgaggaccacgtaaaagtgcagttttaattcatttgcctgacatcctaaaaaagatatttgcctgagaatatcttttgtggcggtgatgtttagtgaatggcctcgtcggttgtactgtataactattgctttttcttcatgaactaatggtgattgatttgtacgtgtc

SEQ ID NO: 4597 - DNA, 442 bp, Triticum aestivum
agaactgcgactgcctccaagcttccaggtgtgccactccctcggcgagggcaccggttccggcatgggcacgctgctgatttcaagatcagggaggagtacccggaccggatgatgctcaccttctccgtgttcccatctccgaaggtctctgacataaaggtcgagccctacaacgccaccctctcggttcagcagctggtggagaactccgacgagtgcatggtgctggacaacgaggtgctctaccacatctgcttccgcgccctcaagctgaccacacctagctgtaagcagatctgtgacatcaagttatattacctacctacctgtactttttttttgactgaatacctgcctgtacttttgttactaatgtgaatggtaaatgatcattatgctggcaacatggtgaattatagcaccggagactggactgtcc

SEQ ID NO: 4598 - DNA, 653 bp, Triticum aestivum
cgtgccgcgcgccgtgctcatggatctcgagcccggcaccatggactccgtccgcacggggccatacggccagatcttccgccccggacaacttcgtcttcggccagtccggcgccggcaacaactgggccaagggccacttacaccgagggcgcggagctcatcgactccgtcctcgacgtcgtccgcaaggaggccgagaactgcgactgcctccaaggcttccaggtgtgccactccctcggcgggggcaccggttccggcatgggcacgctgctgatttccaagatcagggaggagtacccggaccggatgatgctcaccttctccgtgttcccatcccccaaggtgtctgacaccgtggtcgagccctacaacgccaccctctcggttcaccagctggtggagaacgccgacgagtgcatggtgctggacaacgaggcgctctacgacatctgcttccgcaccctcaagctgaccacacctagctttggtgacctgaaccacttgatcagtgccaccatgagcggtgtcacctgctgcctccgcttcccagggcagctgaactcagacctccgcaagcttgccgtcaacctgatccccttcccgcgcctccacttcttcatggtgggctttgcgccgctcacatctcg

SEQ ID NO: 4599 - DNA, 432 bp, Triticum aestivum
tgcaaaattctcgggtacgacatatccaagggcaccacagtactggtaaatgcatgggcgatcggccgggaccctaagcattgggatgatcccgaggagttcaagccggagaggttcgagtctggaatggtcgacttgaaaggcacaaactttgagtacataccattcggggcaggcaggagaatgtgccctggaatgacatttgcgcaggccagcatggagattgtgcttgcctcacttctctaccactttaattgggagctcccaagtggggtcaagccagatgggctagacatgactgaggagatgggcctcaccgtccggcgaaagaacgacttgtatctgcacgtcgtggtccatgtgcccttgatttgatttacacttgcattggtatgtcatatgtgactgaattctcgcatattagtctcttct

SEQ ID NO: 4600 - DNA, 707 bp, Triticum aestivum
tcagttggcccatgtcggagctcatgaggtacccaaacgtgatggcggaaagcacaagctgaagtacgcaaaaacctccaaggtaaaacataaggtgactgaggatgacttggcctatctcaagtaccttagactcgtcatcaaggagacaatgaggttgcatccagccgcgccattgcttctccctagagaggccatggagccttgcaaaattctcgggtacgacatacccaagggcaccacggtgttggtgaatgcatgggcgatcggcagggatcctaagcattgggaggatcctgaggagttcaagccggagagattcaagtccggaatggtcgacttcaaaggcacaaacttcgagtacataccgttcggggcaggcaggagaatgtgcctggaatgacatttgcgcaggccagcatggagattgtgctcgcctcacttctctaccactttgactgggagctcccaaatggggttaagccagatgggctagacatgaccgaggagatgggtctcaccgtccggcgaaagaacgacttgtatctgcacgccgtggtccatgtacccctgatttgatttacacttgcattggtatgtcatatgtgactgaattctcgcatatttgtgccttctatgtgccttggtcaactgtgtgactgctagactgccttgtcaggtgactgccagagatacgttgtcgatta

SEQ ID NO: 4601 - DNA, 568 bp, Triticum aestivum
  N_region (95)..(95): n = any nucleotide
ccgacatggctcctcggcctcgccgtcgtgcttgtcctccttcagctcctggccattgcgttggtgtactcgcaagtggccctacgagatcatgnagaaagggtcagccgacgcgggccacgggagattctcatggcggaacctggcgccgcgggtggcgctgcggaccttgtatgttgcggcgtgcgcgtttgtggcggcggcgctgccgttcttcggtgacatcgtgggcgtggtcggcgccttggggttcatcccgctcgacttcgtgctccccgtcgtcatgtacaacattgcgttggccccgcctaagaggtcggcggtgtatgtaatcaacgtggcgatcatggccttgttcaccggtgttgggatcattggcgccattgcgtccgtgcggaagcttgtgctcgacgccggacagttccagctgttcagtgaccatgtcatcagctgaattattttcttgccgcatatgtagaacattttatcatttttaggggaatttcttgttatagctcaggtaaagtagtccggtcaaagcccatcaactactcaaactgtgtcatca

SEQ ID NO: 4602 - DNA, 738 bp, Triticum aestivum
ggtgaaggcgctggtgctgtgctacactgtggtcttcttcaccttctacctgtcggccatctctggctactgggccttcggcaacaaggtgcagtccaatgcgctgcagagcctgatgccggactcgggaccctctctggcaccgacatggctcctcggcctcgccgtcgtgctcgtcctcctccagctcctggccattgcgctggtgtactcgcaagtggcctacgagatcatggagaaagggtcggcagacgcgggccatggaaggttctcatggcggaacctggcgccgcgggtggcgctgcggaccttgtacgttgcggcatgcgcatttgtggcggcggccctgccgttcttcggtgacatcgtgggcgtggtcggtgcgttggggttcatcccgctcgacttcgtgctccccgtcgtcatgtacaacatggcgttggccccgcctaagaggtcggcggtgtacgtaatcaacgtggctatcatggccttgttcaccggtgttgggatcattggcgccattgcgtccgtgcggaagcttgtgctcgacgccggacagttcaagctgttcagtgaccatgtcatcagctgaattagtttcttgtcccctttgtaggtcattttatcatttttaggggaagttctttttatatatctcaaactaaagtaggccgcgcgtggaccatctaccacacaatccaaatcatcgaatatatggttctgtgttacaatatg

SEQ ID NO: 4603 - DNA, 670 bp, Triticum aestivum
  N_region (207)..(231): n = any nucleotide
cacccaattcgacgacccaagccggtgagcagacgaacttcactggtgctgttagtaattcaaggctcagggagtcaccggtgccagatttgagctctggttctgccaatgcacaagtcagagaggcgcttgcattgccggagactagactggatattgctgaactgagggtaccgttgatccagccacagccagatagaaccagtnnnnnnnnnnnnnnnnnnnnnnnnnatggcatcgggttgggctcatcaggggcaatcaagcttgggctgggggacttcatattctacagcgtgctcgtcgggagggcggctatgtatgactacatgacagtctacgcgtgctaccttgccatcattgcggggctcggcatcactctgctactgctggcattctaccgcaaggcattgcccgccctaccggtgtccatcaccctcggcgttctgttttacgtgctcacaagaacactgctcgagacatttgttatgcagttctccacaagctttctgatgttttagcatccatgtttgtatgtcattatagttcacattcaaggccttctccagttggttaggttgtattttgggaactgttcatcctggtcacgccatgtttgtgaaactgttaatctgatggcgtacacgacatattgatatatgtaccggct

SEQ ID NO: 4604 - DNA, 1243 bp, Triticum aestivum
aagctccaggagaatatgcattataagatttcacgatagaacaatatgagatggtaaagccatgatacagcaatgcaaatacaagaaaattgataatcgttctccccacagctcaaaccaacaaaaagtacagtttcaacacatgcgcttctttgaaacccaagcaccacactcgatgcgcttcactcctgtggccaattcgcatgtctcatggacgcacgtcatggcaacttctcgttagccttgcgcatgatccagaaaggattcggaacattattgacgtccaacaagaatctgcgctggcccctctcattagtcatctaggtagtagtaggaccctgcattcttttgttctctgtccttcgttgattcgagttgttgattcgtggcctatagttggtcgggtctcttctaaatgtaatgtcaagatgcgataagaatttattcatcccagataccaaagactgtggtgcattggcagtacagtcaatagaagcaagtccctcataaacaataaccttgtccgctaagtaggttgccatgatgaaatcatgctccacaataaatgcagttttcttgcatgaaggatgaatcttttgataaccttcgaggcaacaatacgctgctctgaatcaagatatgcacttggctcatcaattaaataaatatctgcaggctttccaaggcacaaacataatgctactctctggagctctccacctgataaattaataacttcctggtacatgagttgctcaatttgtagtggtttcataacatcagatacaaactgaggatgagtatatgaatcgcgtattttcgaatgaagcaagtgcctcactggatgctggaattttgggctgatcttttgaggcttgtaggacacattgaattcaggaatttcaacctcagttccttccatggtatctggcttcaacaacccggccagcattctgatgaatgtagttttccctgtgccgttctcaccaagcatcacaacaatctgagaatcagtgaattcaccctcaacgacagagagcttgaaatttccctgtgttttgctcatggtagggtacttgtaccgctggtacgtagcaacttcctctgcgttttcctgggtctccgcaatcttaaatgtaagagattcatctcgaaaccgaaggttttctgttggaacaaatccagccaggaaaatattgataacttctcggaccgaaaatggtaacgtaactacaccgtaagc

SEQ ID NO: 4605 - DNA, 766 bp, Triticum aestivum
ttatcaggggagaagctccagagagtagcattatgttttgtgccttggaaagcctgcagatatttatttaattgatgagccaagtgcatatctcgattcagagcagcgtattgttgcctcgaaggttatcaaaagattcatccttcatgcaaagaaaactgcatttattgtggagcatgatttcatcatggcaacctacttagcggacaaggttattgtttatgagggacttgcttctattgactgtactgccaatgcaccacagtctttggtatctgggatgaataaattcttatcgcatcttgacattacatttagaagagacccgaccaactataggccacgaatcaacaaactggaatcaacgaaggacagagaacaaaagaatgcagggtcctactactacctagatgattaatgagaggggccagcgcagattcttgttggacgtcaataatgttccgaacccttctggatcatgcgcaaggctaacgagaagttgccatgacgtgtgtccatgggacatgcgaattggccacaggagtgaagcgcatcgagtgtggtgcctgggtttcaaagaagcgcatgtgttgaaactgtactttttgttggtttgagctgtggggagaacgatcgtcagttttcttgtatttgcattgctgtatcatggctttaccatctcatatttttctatcgtgaaatcttataatgcatattctcttggagcttattatagtcctctcactagtatatcctcatataatat

SEQ ID NO: 4606 - DNA, 1029 bp, Triticum aestivum
ggcagcacgaaaaccaaaagatttcaggtcaaatcaaattctagtactgtataaaaacatcttgtgattgatggacgcacgcatgtgcgtgtgcgtgtgcagggtcggcgtggaccatgctgtcgcggcgcttcgcggagtactgcgtgatggggtgggacaacctggcgcggacgctgctgctctaccacgccaacctcgtctcctcgccggagttctacttccagacggtggcctgcaactcccgcgagttccggaacgccaccgtcaacagcgacctgcatttcatccggtgggacaccccgcccaaacagcacccgctctacctcggccccaaggactaccgccggatggtgctcagcagcgccgccttcgcccgcaagttcagggacgccgacctcgtgctcgacaggatcgaccgggagatcctcaagcgccgaccgccgtcccgcgacgacgatcacggtgatcacgccgcctctgcctctgttgctaggcacggcgggcagttcttcagctacggcgggtggtgctccgagggggaggtggggctgtgctccaacccctgggaacccagcaggaagggggccatcaagcccggcgctgggtcaagaaggctcagggtcatgctcaacaagatgttgtccggaagaaacttcaggaagcagcagctgtacggtgatccacccttctaccacgtccaagtggtctcaactctgatgatccgagccaaggtgtcatgtacatacagtaaagagagccaaacggggtacccagttaaggcaattttggctgagatggtgcaatctcgcagagtaaccacaggacgtgtaacaatcattcatgggttaacacgattacatatttgacacgatcacccttctacctaactctggctggttctttaggttttctattctactagatgatccgtgcgcaaagggcgagcgcaatacaagtattggaagagtgtgcattgtaatatatagatacagatatggaacatatagaacatacacgcataagagc

SEQ ID NO: 4607 - DNA, 787 bp, Triticum aestivum
taacatcaccaccaaccgccggggacttcccaccgccttcaagctcttcaccgggtcggcgtggacgatgctgtcgcggcgcttcgcgaagtactgcgtggtgggatgggacaacctggcgcggacgctgctgctctaccacgccaacctcgtctcctcgccggagttctacttccagacggtggcctgcaactcccgcgagttccggaacgccaccgtcaacagcgacctgcatttcatccggtgggacacgccgcccaagcagcacccgctctacctcggccccaaagactaccgccggatggtgctcagcagcgccgccttcgcccgcaagttcagggacggcgacttcgtgctcgacaggatacgaccgggagatcctcaagcgccgaccgccgccccgcgacgacgacgacgttgatcacgatgatcacgccgcctctggctatcgctgctaggcacggcgggcagttcttcagctacggcgggtggtgctccgagggggaggtggggctgtgctccaacccctgggaacccagcaggaagggggccatcaagcccggcgctgggtcaagaaggctcagggtcattctcaacaagatgttgtccggaagaaacttcaggaagcagcagtgtaggtgatccaccttctacaacgtccacgtggtctaactctgatgatccgatcaaatgtgtcatgtacatacagaaagagagaaaagggataccataggcaattttggctgagatggtgcaatctcgcagagtaacacaggacgtgtaacaa

SEQ ID NO: 4608 - DNA, 792 bp, Triticum aestivum
agcttgaccgcctcgtgtacctcaaggcggcgctctcggagaccctccggctgtacccgtccgtgccggaggactccaagcacgtggtcgccgacgactacctccccgacggcacgttcgtgccggccgggtcgtcggtgacgtactccatctactcggcggggcgcatgaagacggtgtggggggaggactgcctggagttccggccggagcggtggctgtcggccgacggcaccaagttcgagccgcacgactcgtacaggttcgtggcgttcaacgccgggccgcgcatatgcctgggcaaggacctggcgtacctgcagatgaagaacatcgccgggagcatcctcctccggcaccgcctggccgtggcgccggggcaccgcgtggagcagaagatgtcgctcacgctgttcatgaagcacgggctccggatggtggtgcgcccgcgcgacctcgccccgaccctcgacgagctccccgccgcggcacccgccgtcgcggcctgcgcgtagaagatcgatgtgtatggacccccggcgccgtgcatgcatgctccacgtacggttcgtgccatatggggaaggtccggaggacgaagttggaagtggcaagaaaactgtgtagatacacgagtccaacacaccaacaggtactacttagtaggtgagtatatctacatcgggataaagggatctgtctaaaaatatccaaatcagaaagaaagggaaacacacaggggcaacaaacaataatgctcctctcctgtactgtaatgtactgtactaaata

SEQ ID NO: 4609 - DNA, 637 bp, Triticum aestivum
tgtgatagatgattccagccgttgcttgcgtcggatacgaccgcactgacgcgatggaggtgccatcgccgatcaagacggggtcgtggagccctgaggaggacgcgctgctggtggcccttgtccggcagcatggcgcgcgacggtggagcgtgatcagcgccagtgtccccgggcgcacgggcaagtcatgccggctgcggtggtgcaaccagctcagcccggccgtgcagcatcgccccttcacagtgcaggaggatgcgcttatcatcgccgcgcaggcacgctatggcaacaagtgggccgacatcgcgcgactcctccccggccgcaccgacaactccgtcaagaaccactggaactccaacctccgcaggtgccagcgccgcgccaaggccatggccgctgccactgccgcacgtgtcgccgcctcctcctcgtcgtctggatcggctatgagagcgaagatgcagcaggaggaacaagtcatggtgatgaacgggtcgccaccagccgtcgcgcatggtgcagttactgctgttattgatgacccgatgccaatgctgtcactgaccttgagcctgggcctgccccagatggtcgcagataagggctcagaggaggcaagggcaaggaa

SEQ ID NO: 4610 - DNA, 1021 bp, Triticum aestivum
cttaaatgatgcgctctacttatgagaatgatggatttgtattgagcaccccacgcgtcgcaccactcctcggtctgacagaagccgttgcttgcgtctgagacgaccgcactgacgcgatggaggtgccggtgccgatcaagacggggtcgtggagccctgaggaggacgcgctgctggtggccctcgtccggcagcatggcgcgcggcggtggagcgtgatcagtgccggcgtccccgggcgcacgggcaagtcgtgccggctgcggtggtgcaaccagctcagcccggccgtgcagcaccgtcccttcacggcgcaggaggacgcgctcatcatcgccgcgcagtcgcgctacggcaacaagtgggccgacatcgcgcgcctcctccccggccgcaccgacaactccgtcaagaaccactggaactccaacctccgcaggtgccagcgccgcgccaaggccatggccgccgccgccgccgcgcgtgccgccgcctcctcttcctcgtcgtccggatcggccgcgagagccaagacgcaacagcaggaacaggtcgtggtgatgaacgggacgccgccggccgccgtgcatggagcgggtactgctgccgtcgatgacccgcttccaatgccgtcgctgacgctgagcctgggcctgccccagatggccgcggactgggcgtcggaggaggcaaaggcaaaggaaaaggaaaagacaccaccgccggtgggcgtgggggacggtgaagtgcggctgatggcggcgatgcggcagctggtgagggaggaggtggagaggcaggcagggcagctcttgtactcggtcatcatggccaccaccgctgccagggccgacgggacatcgccgtccgatggcccaaccaacggccaccactaaggtgggtagtaaatcatatatggatggttttcagtgtaatctctgtcatttaagtttgtgttgtttcaagacattcccctgttgaatcatgtaatatcttccgtgtttgctattggcaagtt

SEQ ID NO: 4611 - DNA, 558 bp, Triticum aestivum
caaccccaccccccgttccagagcgcgatcacacaacagagcggtagcagttcctgggccgttcccgccccggccggcgccatggacttcgtcttcgtggagaagctcctcgtgggcctcctggcggccgtggtgggcgccatcgtggtgtccaagatccggggccgcaagctgaggctgccgccgggccccttcccggtccccatcttcggcaactggctgcaggtcggcgacgacctgaaccaccgcaacctggcggcgatggcgcgcaagttcggcgaggtcttcctcctccgcatgggccagcgcaacctggtggtggtctcctcgccgccgctggcgcgcgaggtgctccacacgcagggcgtggagttcgggtcccgcacccgcaacgtggtgttcgacatcttcaccggcgagggccaggacatggtgttcaccgtgtacggcgaccactggcgaaagatgcggcgcatcatgacggtgcccttcttcaccaacaaggtggtgcagcagtaccggcccgggtgggaggccgaggcggccttcgtggtggac

SEQ ID NO: 4612 - DNA, 1013 bp, Triticum aestivum
cctcacctcactccctcggtctctctcggccgtcgctgccaccgcctcgacccgtcactctctgccccccgatggcgacggcgacggcgatgtgcgcgacggccgccacgtacggggcaccgatcccggcgccggcacccgccgcattctctcctcaccgcgcggcccggcgggcggcgggcgcgggcggtgacggcgaggccgcggcccctgttctcgccccgggccgtctcggactcgcgcaattcccagacgtgcctcgatccggacgccagcacgagtgttcttgggatcatcctcggtggtggcgccgggacaaggctgtacccactgaccaagaagagggccaagcctgcggtgccgttgggtgccaactacaggctcatagatatcccggtcagcaactgcctcaacagcaatgtgtccaagatctatgttctcacgcagttcaactccgcgtcgctcaaccgccacctctcgagggcctacgggaacacattggtggatacaagaatgatggctttgtcgaagttctcgctgcgcagcagagcccggagaatcctgactggtttcagggtaccgcagatgccgtacgacagtacttatggctgtttgaggaacacaatgttatggagttccttattctggctggagatcacctgtaccgtatggactaccaaaaattcattcaagcacacagagaaacagatgctgatattactgtggctgccctgccaatggacgaggagcgcgcaactgcatttggcctgatgaaaattgacgatgaagggagaattgttgagttttcagaaaaaccaaaaggagagaagttgaaggcaatgatggttgacaccaccatactgggccttgattctgagagggccaaggaattaccttatattgctagcatgggaatctatgtttttagcaaagatgcgatgcttcggcttcttcgtgacaattttccttcagcaaatgactttggaagtgaggttattcctggtgcacagaaa

SEQ ID NO: 4613 - DNA, 785 bp, Triticum aestivum
gcgcgcaggaagagcggccggcggcgcggcgaggcgggcagggtagcatgtgcgacctcgtggcccgcacggggcgccaccagcagcggtacgaagacggcagacggctcgtcgccgggtgcataccattcaggtatagagctgatgaaacttctggtgatgaacagaaaaaagttgttgaagttctcatgataaactcccaaagcggaccaggtttattattccccaagggaggatgggagaacgatgaaacggttgaacaagcagctgctcgagaagctatagaagaagctggagttcgaggagatatagtgcaatttctaggtttctacgatttcaagagcaagacgcatcaggacgcgtgctgccccgagggcatgtgcagagcggcagtgtttgcgctgcacgtgaaggaggagctggcctcatggcccgagcagagcacccgccggaggacctggctgacggtccccgaagccacgtcacaatgtcggtaccagtggatgcaagaggccttgctgacgggcttctctgagtggcatgacaactggagcaaaggcggcagtgcaggtggcgacccaatctaaacgcaagaaggcgtcctcctctgtcgtctctcgctttcctttgccttctcctctgttctcccctctaggccccaaccttgcacgcaaattgcaataatacagtgtggtgcttttacttgatgatgcctagtaggtcattgacccttggttcctgggattgaagtcttagcgtagtggtatatctcatcgacgacgaga

SEQ ID NO: 4614 - DNA, 1019 bp, Triticum aestivum
  N_region (31)..(31): n = any nucleotide
  N_region (117)..(136): n = any nucleotide
ctctccgcctccccctccacccaccccctcncctcccccgccgcattgctccccgcgcaccgccggaccccactcgccccacaggccggcgagacggcgcgcaggaagagcgggcgnnnnnnnnnnnnnnnnnnnngcagggtagcatgtgcgacctcgtgggcccgcacgggtcgccaccagcagcggtatgaggacggcagacggcctcgtcgccgggtgccataccattcaggtatagagctgatgaaacttctggtgatgaacagaaaaaaagttgttgaagttctcatgataaactcccaaagcggaccaggtttattattccccaagggaggatgggagaacgatgaaacagttgaacaagcagctgctcgagaagctatagaagaagctggagttcgaggagatatagtgcaatttctaggcttctacgatttcaagagcaagacgcatcaggacgcgtgctgccccgagggcatgtgcagagcggcagtgtttgcgctgcacgtgaaggaggagctggcctcatggcccgagcagagcacccgccggaggacctggctgacggtccccgaagccacgtcgcaatgtcggtaccagtggatgcaagaggccttgctgacgggcttctccgagtggcatgacaactggagcaaaggcggcagtgcagctggcgacccaatctaaacgcaagaaggcgtcgtcgtctgtctgtcgtctctcactttcctttgccttctctattctcgtctctaggccccaaccttgcacgcaaattgcaataatacagtgtggtgcttttacttgatgatgcctagtaggtcattgacccttggttcctgggattgaagtcttagcgtagtggtatatctcatcgaagacgagaattatcacaaattttaagtgtctgattctcgcggtgtcatattatttctcaaaattcagcttgattttgatttcttgctcccgattctggggatgcctaccgcaatgtattttaccagacctgaaatcga

SEQ ID NO: 4615 - DNA, 692 bp, Triticum aestivum
  N_region (93)..(93): n = any nucleotide
  N_region (103)..(103): n = any nucleotide
aggcttcgacagaccagctttgctggtttgaggtcatgcctcttttaccagaggaatccttggatgtagaaattcctgaagaggatctggacnataagttttnacgagagctggaggtaaaggaggccagaacgtgaacaaagtggagacggctgttcgcatggtccatatccccactggcattgccgttcgttgcgcagaggagagaagtcagctggctaacaagataaaggccctaaggcggctgaaggcaaagcttctggtgatcgccgaggagcagcgtgcgtcagagatcaagcagatccgcggtgacgcggtgaaggcggagtgggggcaacagatacgcaactatgtcttccacccctacaagctcgtcaaggacgtccgtacggcgtgcgagacatcagacatcagcggtgtgatggatggcgagctggatcccttcatcaaggcctacctccagtacaagctctctgctgctgccgaggagcaaagcgtcaagtgatgctaacatcgactattcgaggtagccgtatggaattttgatgtgctgttcgtcgtcattggctgtggctgattgagccgccctagtgaaggtgcagttttacagaggcttttgcagtttttgtagtctttgtgcccagtgcctctaaaggttctagatatgaaaaacagtcaaatgataaattgag

SEQ ID NO: 4616 - DNA, 736 bp, Triticum aestivum
atttacgagactggagtaaagaggccagaattgtgaacaaatggagacgcctgttcgcatggtccatatccccactggcattccgttcgttgccagagagaggagtcagctagcaacaagataaaggccctaagacggctgaaggcaaagcttctggtgatcccgaggagcagcgtgcatcggagatcaagcagatccgcggtgacgcggtgaaggcggagtgggggcaacagatacgcaactatgtcttccacccctataagctcgtcaaggacgtccggacggcctgtgagacgtcggacatcagcggtgtgatggatggcgagctggatcccttcatcaaagcctaccttcagtacaagctctctgctgctgccgaggagcaaagcatcaaatgatgctgacatcgacaatccagggtagcagtacggaattttgatgcgctcgttatcgttggctgtggctgattgagccgccctagtgaaggtatgcagttttacagaggcttttgcagtttttgtagtctgtgtccagtgcctctaaaggttctagatatgaaaaacagtcaaatgatgaattgagttgaaggttgtgtctagtgaaacagctcgatgagagtttttaactgttggaaccagaagccacaaaggcatgatggtcgaagcattggtctcgtaacacatggagggtgccttctgtaatctgtactgtactatcggtgcttctttcaccattt

SEQ ID NO: 4617 - DNA, 777 bp, Triticum aestivum
tgatcgcagtcgaacatctcttccttcacaagctgaaagaatacacagggagaggactgtgaagcatccacgaggctgctgcttttgctggtgaaaaaatcgaaaatgatgatggtctcatcctacctccttactcgggccatgtcaccattcatttgtgctcgatgatctctatcctgcaaactacgtgtccaagcccaagtgcctgcacaatggactgcgttctaatggaatgactgaagatggtacagggacaaacggggtgcaaaacagaattcctatcatgtcgagccgtaattcagcaggagggatcagatctttgattggatggttggctaaaacagcggtcatgattgtgggcgccgtatcaatcatgaaggctgctggctacgagcccacaatagggaggagcggcataaaactggacattgcaggtctgttgggtaaagaggcggctggtgcaaaagagcaggttcctcctactctacagtgccctcctgggaaggtaatggtgcttggtggagatggccgggcgcactgcgttgtgaaggaaagagttgagatccccttcggcagcagccttgatgccccaaatgcaagctacggcttaggttgaatccggaaccgggcagtgtgaatattaggttctgttagctggtcctcttggtgttgtgtaggaaccgcgtccacgatttgtttcttgtataatgctctctacttggatatttactatgtatttccctgtttagccctgaatgttgagcggcttatgtatga

SEQ ID NO: 4618 - DNA, 654 bp, Triticum aestivum
  N_region (580)..(604): n = any nucleotide
cggcggccaccccagcgccgccgatctgaagcggctggtgtacctgcacgcggccctcctcggagtcgctccggctgtacccaccggtgccgttcgagcacaaggcgggagcgcggccagacacgctgccgagcgggccggccgtgcggcctacgaggagggtgatcgtgtcgttctactcgatgggacgcatggagtcggtgtggggcaaggactgcctggagttccggccggagcggtggctgacggcggcggggcggctccggcacgagccgtcgtacaagttcgtggcgttcaacgtggggccccgtacgtgcctgggcaaggacctggcgttcacgcagatgaagtccgtggtcgccgccgtcctgccgcggttcagggtggaggtcgcccccggtgccgtggtgaggcccaagctgtccatcatactccacatgaaggacgggctcaaggtgagggtttacaagaggcaagacgatgcccgctaggcctacgtacatacctataccgatgctcgcacaaaatgtactactacatattgtggtgtatgttgtatctcctgatttgtgaggttatnnnnnnnnnnnnnnnnnnnnnnnnnaaatactgtataacgaatgatgtgtatacaaaggataaaaaataatgtat

SEQ ID NO: 4619 - DNA, 854 bp, Triticum aestivum
gctggtgtcctgcacgcggcgctgtgcgagtcgctccggctgtacccgccggtgccgatggagcacaagggcgtggtggccgcggaggcgctgccgagcgggcacgaggtgcggccgggggacaagatcatggtgtcgctgtacgcgatggggaggatggaggcggtgtggggcaaggactgccgggagttccggccggagcggtggatcggggaggacggcaagccgcggtacgtgccgtcgtacaagttcgtgtccttcaactccgggccgcggacatgcctcggcaaggacatggcgttcgtgcagctcaaggcggtggcggccgccgtggtgaggaacttcgaggtggaggccgtgcccggacacgtcgtggagcccaagatctccatcatcctccacatgaagaacggcttcaaggccaggatcaagaggaggaagatgctttgattaaatggtgaattcggagcaatagtgtgcctggtgatcgtgaaagaaagatgcatggagtcagcgaatttgtagaccgatcgctgacaagtgacgccgcatgtagctagaaggaaaaatctagtgtcgaactgttgaatgtatcgtgttgcccacttggccagtagcaagtcgtagtcactgttgtcgatctcaaatcgatctagtgtcaactagtggtactcactcggtactgaaatatgcaacgacctgggctaggcccatccattgcgcagcatgtggccagtgggccggcccgtgaggcctgtaatgtacactacatatagcagtgttgcgtgtgcgtgtggggcatgaggattgtaatgactgaatctttgtatccctaatcccagagccttcctctg

SEQ ID NO: 4620 - DNA, 558 bp, Triticum aestivum
cccttcagttctctccaatcccatccgcgtgctgccgtacataaccctagcccctccgcccctgctgatccccgccgcgcggtcatggcaactgctgccgttcgccggtcgacgacgccgtcgggatggacgtcaatgtcctcgcatttccccgcactccgccgtcgccaggaagaataagccgcaccagccccggagcggcgccgcggggaccggcgggggaggcgggcagaagcggctggccgtgctgggcgaggaggggtgcgacttcatcggcgggatcgacgacaagtacctgctggaccgggagctggggcgcggggagttcggggtgacgtacctctgcgtcgaccgggacaccaaggagcagctcgcctgcaagtccatctccaagcgcaagctgcgcacccccgtggacgtggaggacgtgcggcgggaggtggccatcatgcgccacctgccccggagccacagcatcgtggcccttgcgggaggcgtgcgaggacgagggcgccgtgcacctcgtcatggagctctgcgagggcggcgagctcttcg

SEQ ID NO: 4621 - DNA, 512 bp, Triticum aestivum
cccgcccgccgctgtatctagctctcgccgccgccgtccgcccccagatcgccgtagctaggcgccatgggcaactttctgcggcgcgccgtcgacgcagggggcgcacgggggaagaacgacaggaggaagcccaaggcgaacccctacaccgtcgcctacaaccgcggcgcgggggcgccgccggcgcgggcggggctggtggtgctgcgggaccccacgggccgggacctggacgacaagtacgtgctgggcggcgagctggggcgcggcgagttcggcgtcacctacctctgcaccgacgccgccacgggcgcgcggatggcctgcaagtccatctccaagcgcaagctgcgcacccccgtcgacgtcgaggacgtgcgccgcgaggtggagatcatgcgccacatgccgccgcaccccaacatcgtcagcctcagcgccgcctacgaggacgaggacgccgtgcacctcgtcatggagctctgcgagggcggcgagctcttcgaccg

SEQ ID NO: 4622 - DNA, 756 bp, Triticum aestivum
agaggtcatgtcgatggacttatcgagattttccggagcctgatatgttctcggacccttggatctcatgttctcagaaagttctccacctttgccattgggatgagaaccatgcttacacaagggacgctattgagctgtattgtcaggctggtgatggcacaccgttttccagaagtgaattgttaaaatatcttctggaaggaactgtcgactcagggtcgctcccagaaagccttgatggggaagatggagaacatggtactgtcaagggcagcacagctatatcatcaagccagggctcctccggtaagtggatcaaagtaagagaagggaaaactcttcaggaagcgctgcagcataaagactacatcatccccgctgtacctgtgttctttgtggtttcaaggaagtccgccttctattcgaagttcaaggctgggaattggtctttgccgtagagctgcagtttagtagttcagttcaccatattcgttggaagaggctaagggtgctatgggtatatgatcaggaaagagaagctggcaattgtgaaccgctgtatggtcctagaaggttatactacttgagagaaaatgagttgtgctttaattagcacttgtgtgtctcccaaggtccaatcactgtttggttgatggctcaggagtgcgtttctagagggagaaacaactgtattttagctgttctgtatgccctgaatactgatttcgatgcggttatgttgctcaattttgg

SEQ ID NO: 4623 - DNA, 788 bp, Triticum aestivum
tcatgtggatgtgacgtacgatgggaagtggatactgggaaccactgatacctatctgatactcatatgcaccattgtcattgacaaggatgggaaggagaagacagggtttggtggaagaatggggaaccgaattgctgcaccaagactgctcaagctcagcccactgcactctcatcttgcaggggacaatagcaagttccgtgagggcaggttttcatgggtcacggataacggcaagcaggagaggcatctcgtgacgaccgtggggaggtacagcgtggtgtggaacttcctccaggtgaagaacagccaccacgagtgctaccagaaccaggaggggctgaagagctgctactgctacaaggtgatccccaaggacgagtccatcgtggccagtcgcttcatgcatgagaagtacgacttgagcgactgccctgaggcgcctctggtcgtcgcgacgcccatgaaggtcacctccttcagcgtggctagccagcgctagctccgtgcttccgcctctcagtgttcttttttttcagttgggttgttggtctccgtgctgtcatgtaacttcttgacatgcggatctggacttccaagtgtgatgatgactatctatctagtcatggcttgttacaggatttatgagttatgtggattgatagcctaaactatcttacggattgatgatttgtactggctagattgattctagaacttctctgaaagataggatatgaattttaaattctcgcaatacatgatgtattcatctgtccgtgtgt

SEQ ID NO: 4624 - DNA, 664 bp, Triticum aestivum
ggaaggagaagacaggatttggtggaagaatggggaaccgaatgctgcaccaagactgctcaagctcagcccactccactctcatcttgcaggggacaacagcaagtttcgtgagggcaggttttcatgggtcacggataacggcaagcaggagaggcatctcgtgacgaccgtggggaggtacagcgtggtgtggaacttcctccaggtgaagaacagccaccatgagtgctacaagaaccaggaggggctcaagagttgctactgctacaaagtgatccccaaggacgagtccatcgtggccagtcgcttcatgcacgagaagtacgacgtgagcgactgccccgaggcacctctggtcgtcgcgacccccatgaaggtcacctccttcagcgtgtctagccagcgctagctccgcgctgccgcctctcagtgtgtgctttttttccagtttggttgttggtgtccgtgctgtcatgtaacttcttgacccgcggatctggacttccaagtgtggcgatgactatctatcttagtcatggcttgttacaggatttatgattatgtggattgctagcaaaactatcttacacagtgatgacttgtactggctggattgattctgaatttctttgaacgaaggaatgaatttccactctgccaa

SEQ ID NO: 4625 - DNA, 735 bp, Triticum aestivum
  N_region (598)..(598): n = any nucleotide
ggcacccacgctcgggcacgggggcgcacgacacgacgagaaaaggacgccacctcctctcctccccctcccctcgtggtctcctcctccgccctcccacacccaaaaagctctagggaaacccccacgcgcgcgcctggtgccggatcggatcggggatgtgggagtcggtggcgctcacgctggccggcgccgccggcaacagcatcggcaaggtcctccagaagaagggcacccacatcctcccgcccctctccttcaagctcaaggtcatacagggctacgcgctcaacaggctctggatcagcggcttcctcctggacatgtgcggcgccgccctcatgctcactgcgctctcgcaggcgccggtctctgtcgtgcagccgattgccggttgcggcctcgccatactctgcgtcttctcccatttttacctcaaggaggtcatgaatggccttgattggcttgcaatcacaatggccggtctcggcaccataggagtcggtgtaggaggggaggagcagaaagtggaagagattccccttttcagtataccttggctggtgctcaccgatctcatcttgtttgtcctgctcancgattggcttcatatctaccaaaagcaaggcgcgaaaagagtgcatgtactgagtgctcagaggtctatcggttaaatcggctttgttggatcacaggacctacaggctgcatgctgacggttccgaagtgtcatgc

SEQ ID NO: 4626 - DNA, 560 bp, Triticum aestivum
caggcaccaacgagagagcacgcaccaccggcggcacccacgctcgggcacgggggcgcacgacacgacgagaaaaggacgccacccggccacctcctcggctcctccccctcgtggtctcctcctccgcccacacccaaaaagctccagggaaaccccccacgcgcgcgcctggtgccggatcggatcggggatgtgggagtcggtggcgctcacgctggccggcgccgccggcaacagcatcggcaaggtgctccagaagaagggcaccctcatcctcgcgcccctctccttcaagctcaaggtcatacggggctacgcgctcaacaggctcttgatcgacggcttcctcctcgacatgtgcggcgccgccctcatgctcaccgcgctctcgcaggcgccggtctctgtcgtgcagcagattgccggctgcggcatcgccatactctgcgtcttctcccaatttttactcaaggaggtcatgaatgggcttgattggaatgccatcacaatggccggatatgggaccataggagctggtttaagaggggaggaccaaa

SEQ ID NO: 4627 - DNA, 1285 bp, Triticum aestivum
agctgatgcgcgcgtcggcggaggtgctcggccgcgggagcgtggggacgacgtacaaggcggtgctcgacggccggctcgtcgtcatcgtcaagaggctggacgcggccaagatcggcccggcggcttcggaggcagagaccttcgagcagaacatggatgtgattggccggctgcggcatccgaacctcgtgccgctgcggtccttcttccaggccaaggaggagcggctgctggtgtacgactaccagcccaacggcagcctccattccctcatccacggttcaagatcgtcccggggaaaaccgctgcactggacttcatgcctgaagatagcagaagatgttgcacagggccttgcttacattcatcaggcatctcggcttgttcatggaaacatcaagtcctccaatgtgcttcttggttcagactttgaggcttgccttaccgacaactgcctgtcattccttctggaatcagcagaagtcaaagacgatgctgcttacagagcaccagaaaacatgaagtcccacagaaggctcacacccaaatcagacgtctatgcttttggcatccttctcctcgagctcctcagcggccaggcgccgcttgagcattcggttctggcagcaaccaatctccagacgtatgcgctgtcggggagggaagacgaaggagtggacagagagcgcctctcgatgatcgtcgacattgcgtctgcttgcgtccggtcatcgccggagagtcggccaactgcctggcaagtcctcaagatgattcaggaggtgaaggaagcagatgcaactggtgacaatgaggacggcgatcttgatcttactagcgactcctagaccctgttcctattcgtcctatggatgaaatggatcatgtccactgggttgatgcattatcccaagtgaacaaccgtagttatatgcagtttgctctgcctagaagagctgatggaagggtgttagtggtgtgggagaatggatttggggtcatgatctctctgactggtgtctcttgagctccgaattctgtagcatatgttaggttttctcccctggtgtacccctggtgtatggatgttgtggtgatgtggacatggtgttgtctttttagcatcaatcttccttggagatttatattatagtgaggttaaaggccaaagtcacatagtactggttcagcaccaatcttctactatgtggacattattaatagtgaagttacagaccaaagtaatgtaccgtgttgagattagtactgatcaactctgctg

SEQ ID NO: 4628 - DNA, 598 bp, Triticum aestivum
cccgcgccttacgcctcgtgaccgcactgccatcttcggctcgaggcgtctcctccctacccagccgtgcctcaccctgtgctgctggtgttcgcgcgcggtcgtcatcaaccttgtgcgagacctggcgccagagaaggtgtcaaggttcatacccgtccccatggccatggcgataccgttctacctcgggttgtacttcgcgatcgacatgtgcgtcggcagcgcgatactgttcgtgtgggagaagatggataaggccggggcggacatgttcgcgcgctcggttgcttcgggtttgatctgtggcgaggggatctggagcatgccgcagtccgtgctggctctgtccaaggtgcagcctccgatctgcatgaagttcctgtccagatccacgaatgctagagtggatgccttcatccaaaccctctcgtccaagacatagcattcattctcgtttaccccattagtactcagcttcgtgatcgtgcaacattatatcgctttgttgatttattaattttgtgctgcttgtttgtctgcgagttttttacggaagcttcatttaaatgccaggatcccatgttctgaattcata

SEQ ID NO: 4629 - DNA, 640 bp, Triticum aestivum
ccggggctgcgtcatcgggccctgcgtcttctggctcttctacagggcgttcgacaacgtcgggctgagcggcagcgactacccggcgccctacgccgtcgtgtaccgcaacatggccatcttcggcgtccagggcttctcctccctgcccaagcactgcctcaccctgtgctgcgtggtgttcgccgcggcggtcgtcatcaaccttgcgcgagacctggcgccagagaaggtgtcgaggttcatgcccgtccccatggccatggcgataccgttctacctcgggtcgtacttcgcgatcgacatgtgcgtcggcagcgcgatactgttcgtgtgggagagggtggataaggccggggcggacatgttcgcgcgctcggttgcttcgggcttgatctgtggcgaggggatctggagcatgccgcagtcggtgctggctctggccaaggtgcagcctccgatctgcatgaagttcctgtccagatccacgaatgctagagtggatgccttcatccaaaccctctcgtccaagacatagcatccatgcattctcgtttacccaactagtagtactactcagcttcgtgatcgtgcaacattatatcgctttaattgatttagtttgtactgctggtttgtc

SEQ ID NO: 4630 - DNA, 659 bp, Triticum aestivum
  N_region (569)..(569): n = any nucleotide
attgtcatggatctggctattcggattaatccagcaattgatatgggccaggattgaaggagctttcatccaaggtttgggttgggctgccatggaagagctaaaatggggggatgacaaccacaagtggattcgacctggataccttttcacttgtggtcctggctcgttacaaaataccctctgtaaatgatatacctctcaatttcaaggtttcactattgaagggtgttccaaatccaagggctatacactcatccaaggctgtaggagagccaccgttcttcctcgcttccgccatcttgtttgcgataaaagacgcgatcgcggcagctagggcggaggagggtcatctcgactggttccctctcgacaacccggcaacgcctgaaagaataagaatggcgtgtgttgactcaattacgaagaaatttgcgtgtgtgtattaccgtcccaagcttagtgtatagtggttaactgccagagtagccgatacattcaacgtaaatgtgtacctgttatgtggttgtactatactgtacagtacggacacgctgtgtgcaagatanaagtacagatgaagtgttgatataggattacgaataccacatacttcaaataacctactgaaatatgagcaaaaacaaatattatactct

SEQ ID NO: 4631 - DNA, 766 bp, Triticum aestivum
  N_region (709)..(709): n = any nucleotide
ctgatctgcagggatccattaatattcacctaggacggcattgcagaagttgagattgacaccctaactgggatttcccacacaagacagctgatattgtcatggatctcgctattcgattaatccagcaattgatattggtcagattgaaggagctttcatccaagtttggttgggctgccatggaagagctaaaatggggggatgacaaccacaagtggattcgacctggacaccttttcacttgtggtcctggctcttacaaaataccctctgtaaatgatatacctctcagtttcaaggtttcactattgaagggtgttccaaatccaagggctatacactcatccaaggctgtaggagagccaccgttcttcctcgcttccgctgtcttgtttgcgataaaagacgcgaccgcggcagctagggcggaggagggtcatctcgactggttccccctcgacaacccggcaacgcctgaaagaataaggatggcatgtgttgactccattacgaagaaatttgcgagtgtgtattaccgtcccaagcttagcgtatagtggttactgccagagtagccgatacatacaacgtaaatgtgtatacctgtttatgtggtgtactatactgtacagtacagactcgatgtgttcaagataaaagtacagatgaagtgccgatttaggattatgaatactacatatttcanataacctgtactgaaatacgagcaaaaacaaatagtttgatttttttcagttaagtg

SEQ ID NO: 4632 - DNA, 760 bp, Triticum aestivum
cacgacgagatccatccaccccagaggccaagaagagaagggaggagagagagaagccggcggcggcggaggatcagacgatcggagatggtgcggaaggcgaaggttgagttcgacgagaggccgccggatgacttcgacccgaagaacccgtacggggacccggtggcgatgctggagtacagggagcacctggtgcgggagaagtggatccagatcgagaccgccaagatcatccgcgaccgcctccgctggtgctaccggatcgagggcgtcaaccaccaccagaagtgccgccacctcgtcgaccagtacctcgagtccacccgcggcgtcggatggggcaaggaccaccgcccggcggacctgcacgagcccaagaaggtggttgaggtcgaggagtagctctgcttccgctgccgttcctggaatggagaggtcatctttccattcgaagtgaaggaagtaacttgaattgccgcagctcatctcttacctctgaagttgctgataggcatttaataaatgatgatgcgaaggaaacattgttgtgtggtgtctgtattttttcttttgtcaaattcaaggagttaagcaaatcgttgcttggacttgcctaccttgtttcgagtttcatttatacaaatgatgtttagttgcccttttgcctttgcatcttgagtttacaagtgtgtaggctcttgctgtgccgtacaagttctttctattatgtcactgctgccttttttgtatgaaatga

SEQ ID NO: 4633 - DNA, 817 bp, Triticum aestivum
ctccaatccccacgacgagatcatccaccctagaggccaagaagagaagggaggagagagagagtgccgcggcggcggaggagcaggcgatcggagatggtgcggaaggcgaaggtcgagttcgacgagaggccgccggatgacttcgacccgaagaacccgtacggggacccggtggcgatgctggagtacagggagcacctggtgcgggagaagtggatccagattgagaccgccaagatcatccgcgaccgcctccgctggtgctaccggatcgagggcgtcaaccaccaccagaagtgccgccacctcgtcgaccagtacctcgagtccacccgcggcgtcgggtggggcaaggaccaccgcccggcggacctccacgagcccaagaaggtggtcgaggtcgaggagtagcacggtcgcttccgtcgccgttcctggaatggagaggtcatctttccattcgaagtgaaggaagttacttgaactgccacagctcctctcttacctctgaagttgctgataggcatttaataaatgatgatgcgaagcaaacattgttgtgtggtgtctgtatttttttttgttaacttgaaggagttaagcaaatcgttgcttggacttacctaccctgtttccaatttcatttatacaaatgatgtttagttgcctttgcctttgcatcttgagtttacaagtgtgtacgaaagacggctcttgctgtgctgtacaagttctttctactctgtcactgtgctgctttttttggtattaaatgggctgcacattgccgtactgaatgaaatggggaggcagc

SEQ ID NO: 4634 - DNA, 658 bp, Triticum aestivum
aaaggattcaagaaggagctcatggatttgcaaaaggatccaccaacatcatgcagcgctgggcctgctggggcggatctattccactggcaggccacaatcatgggccctggtgacagcccctactcaggaggggtgttcttcgtcaacatccatttccctcctgattacccctttaagcctccaaaagtgaatttccaaacaaaggtgtatcacccgaacatcaactccaacggcagcatctgcctggacatcctcaaggagcagtggagcccggcactgaccatatccaaggtcctactctccatcagctccctgctcaccgaccccaaccccgacgacccccttgtcccggagatcgcgcagctctacaagaaccagagaggccgctacgaggagaccgcgagggcctggacccagaagtacgccatgggctgatcgctgcaaagatgaccgtggcatcgtgtaagacaacttctgtgtcgcgccggtttcccgccctctgagtttcgaccccatatctggctttctctgaaccagttttacttgtgtacagttgtcaaaactgggtgatgtttgcatttctgtttccaaactttgggtgtacgccctgtccctgaagacctgtatgtatcaacacagaacatttttaagaatt

SEQ ID NO: 4635 - DNA, 886 bp, Triticum aestivum
  N_region (175)..(175): n = any nucleotide
caagcttgaactaaaagattcagcgtcggccaatggcacacgaggaggccgcgagagagtagcgacgactccaatcgattccagcccccctacgccgacctataatcacattcccacctgctccatcaatcattgccggaatcgattcattcgttccttctctcgggggaccganagcaaaggagagaacaatccaaagccttcccaggcctacagatatggcgacagaaggattcagaagagctcatggatttgcaaaaggatccaccaacatcatgcagcgctgggcctgctggggcggatctattccactggcaggccacaatcatgggccctggtgatagcccctactcaggaggggtgttctttgtcaacatccatttccctcctgattacccctttaagcctccaaaagtgaatttccaaacaaaggtgtatcacccgaacatcaactccaacggcagcatctgcctggacatcctcaaggagcagtggagcccggcgctaaccatatccaaggtcctactctccatcagctccctgctcaccgaccccaaccccgacgacccccttgtcccggagatcgcgcagctctacaagaaccagagagcccgctacgaggagaccgcgagggcctggacccagaagtacgccatgggctgatcgctgcgaagatgaccgtggcatcgcgtaagagaacttctgtgtcgcgccggtttcccgccctctgagtttcgacgatgcccaagagaccccatgtgtggcttcctctgaaccagtttttacttgtgtacagttgtcaaaactgggtaatgtttgcatttctgtttccaaactttgggtgtccgccctgcccctgaagacctgtatgtatcaagacaaaaca

SEQ ID NO: 4636 - DNA, 1039 bp, Triticum aestivum
catgcctgttctcattcgcaggggctcttcgtcctggtgatccaatgtctatcagaggcagctcatcgatcagtgcaggacatcaagtttctgtaaattgttggagtgtgaccttggagagagcaagtgccactccccaagcgcaatcatgaagatgttccagagctctttattctgcttgcagccccagggtgattcctatactagaagatctgccttcgactcaatgttggctggctgcatacctgttttcttccatcctggttcagcatatgtccagtatacatggcatcttccgaagaattatacgagttactccgtcttcatccctgaaggtggcgtccgtgatggaaatgtcagtgttgaggagatactaagaggtatccatccagacatcgtcaagcagatgagggaagaggttatcaatctcataccaaggtgatatatgctgatccaaggtcgaaactggaaacgctgaaggacgcgtttgatgtttcggtttcggcaatcatcaacaaagtgacacaattgagaagagatatcatctcagacagtgaagataaagattttattgaagagaatagctggaaatatgaactgttagaaggacagcggacaattggacctcatgagtgggatccattcttctcgaagcccaagcccaaggacaagggtgcagattctggtaattcatcagctgaagcggccaagaattcttggaaaatcgaacgaggagaccagaattagaccgcacaactgactgctcttagagatgagcaaacagctatcctagctgacggtgcactgatgcaaatccgcggtaaagaatccttagatgctgtagtcttggcgatcatgtatgttcttgatgatccaacccctacagctggtgtaagaagtggtgccaccaaagtccttgagaaaatatgacacatggcctttgctttgcctctacagatatacttttctcatactagaattttcatttgttttgtttgcccataacgctatgtaaatccttgcaagatctagtggtatg

SEQ ID NO: 4637 - DNA, 591 bp, Triticum aestivum
agagggagaagtttttctaccggctccatctccgtctctgccttggatggaggatatcatgttctggacgagtcttacaactacagcagtgacctcagaccacagccaagcaactttggaagccgtcaattggtttgctcgagcttggagtcctcggtgcacaggggattgttcctatgaaaactcgggatggaaaaggttcatcagacacctattgtgttgcaaagtatggatcaaagtgggtccgaacacgtactatcatgaacaatccaaaccccaagttcaatgaacagtacacttgggaggtctatgatccggcaactgtcctgactattggtgctttcgacatggccagcttggagacaggaacggggacaagccatccagtggtaaagatgcgaaaatcggcaaggttcgaattcgcctttcaacacttgaaactggccgagtatacacccactcatatcctctcctggttctgcacccatcaggggtgaaaaagatgggtgaactgcacctagccatacgattttcctcaacgtcattggtgaacatgctgtacctgtactcccgacctttgctgccgaagat

SEQ ID NO: 4638 - DNA, 670 bp, Triticum aestivum
  N_region (300)..(327): n = any nucleotide
gtgaaggagagaactcccagtgagaacgtcaccacaatgctcctcctacagctggtgtgagccaaggaagaacactcatgaagatgtgaagcccctgatgggtgacaaacttaaatgcctttgagatcatctccttctccacggggtttgacctgtctggcctattcatccgagaggagtgcagaaaggagacaaggttcacttcagacaagcctgcttcagccatcatctcgaagctggaatatgttgcgaaagcgctgaatctcagggtaaggaagaaggacaatggcgtggtgaagnnnnnnnnnnnnnnnnnnnnnnnnnnnngtgctgttcagttagacatggagatcttcgagatcacaccttcccaccacctcattgagatgaaacaaacaagtggtgatccactggagtaccgggagctattggaggacatccggccagcgctgaaggacatagtctgggcctggcacggagatgaccaccaccagcagctagagtaggttttggaatcttgagtatttagttttggttctgcgaattcgtccagttttcagctggaacgatcctattttacatgcgtgtgttctttgtacaaaatatattttttcctacatgaggtgaggcattctgttcgaggcattgttgagaagttgaaatgcataat

SEQ ID NO: 4639 - DNA, 673 bp, Triticum aestivum
gaaggagagaactcccagtgagaatgtcaccacaaatgctcctcctacagctggtgtgaggccaaggaagaacactcatgaagatgtgcagcccctgacggtgacaaacttaaatgcctttgagatcatctccttctccacggggtttgacctgtccggcctattcatccaagaggactgcagaaaggagacaaggttcacttcagacaagcctgcttcagccatcatctcgaagctggaatacgttgcaaaggcgctgaatctcagggtaaggaagaaggacaatggtgtggtgaagatgcaagcaaggaaggagggaaggaatggtgctgttcagttagacatggagatcttcgagatcacaccttcccaccacctcattgagatgaaacaaacaagtggtgatccgctggagtaccgggagctattggaggacatccggccagcgctgaaggacatagtctgggcctggcacggagatgaccaccagcagcagctagagtaggttttggaatcttgagtatttagttttggttctgcgaattcgtccggttttcagctggaacgatcctattttaaatgcttgtgttctttgtacaaaatatattttttcctacatgaggtgaggcattctgttgaggcattgttgagaagttgagatgcataataaagg

SEQ ID NO: 4640 - DNA, 764 bp, Triticum aestivum
tggtcacggtgcctgatcgacggatcgcgcttctggatccactggtcggcttcttcttcatgcggtgttcatctggggctcgccttcccgtaccaccactggacgacccgtggaaccacatcgggttcgtggtgctgtacgggctcaccttcttcttcgccacttcgggcccaactccaccaccttcatcgttcccgccgagatcttcccggcgaggctccggtcgacgtgccacggcatctcggcggcggccgggaagctgggcgccatcgtggggtcgttcgggttcctgtacctggcgcagaaccaggacccggccaaggtggaccacgggtacaaggccggcatcggggtgaggaactcgctcttcatcctcgccgcctgcaacttcctcggcatgggcttcaccttctgcgcgcccgagtccaacggcctctcgctcgaggagctctcccgcgagaacgaggaggaggcgccggacgccaggacggtgcccgtgtgagaaacacgtcgtcagatagtagtatattctgcgagcaggtttcgatggatgtatggatgttttttatggtcggagagcgttcaactcaggagtcgagtcgagtcgagtacaagaataatctatctaatcttgtgatgggtcgagttgtccaggttaattagggctgctgctcgagttattagcagtgatataggtacggtgtaataccaagtcagagaagtgcatcgaagaggcaagcttatatgtacgtgacgtgtgattg

SEQ ID NO: 4641 - DNA, 1018 bp, Triticum aestivum
tcatcctggtaaccaatagctctttcctcttttggctcaactgctgttgaaagacagagctcgcaaaagctcttgccgaacagctatttgatagtgagaagatgttggttcgctttgacatgtctgaatatgttgggagtagttctgtgttgcgtctcgttggagcacctccaagctatcgtggctatgaagatggtggacaactgaccgagaaagttaggaggaacccgtacagtgtcatcctttttgatgaggtggagaaagcagatccctcggtgttcaatatttttcttcaaatccttgatgatggcaggttgactgatggcagaggccagactgtagatttcaagaataccatcatcatcatgacctcaaatcttggatctgattacctaatatcaaagacggctagagaaaacacaacggaatctacacgggaccttctcatggaacaggtttgcaagcacttcaagcctgagcttctcaacagactgagtgagatcgtcatatttgagccgctttcgcatgacaaactgaaggagataacgaaaatccagatgaagagcattatggccagattagctaccaagggcatctctctttctattagtgatgccgcattggacactatcttatcggaatcatatagcccaacctacggtgcaagacccataaggaggtggatgcaaaagaatgtgatgacaacgctttccaagatgttggtcaaaggacaagccagtgaaggctcaacaatctgcattgaagctactgacgacaagaaggggctggagtatgaagtggtgaagaaggaggcgagcctacactaacctggctctgtttctttgaagaatcggctgcgactgttgctggcctcgctcgccgcgcttcatgctgtgcttgtgttatcgagtgacagtacgctctcgcctgtgacagtacgctatgtattgtgtgtactgcgtatgccagttcacaagacaagattgacgtgaacaaagcaaataacgggatttgcata

SEQ ID NO: 4642 - DNA, 837 bp, Triticum aestivum
  N_region (77)..(98): n = any nucleotide
gtgctccggtagtgcccctccctccacacgttccttccttcgcatggctgaccaccacagagacaggggtgtcctannnnnnnnnnnnnnnnnnnnnnaccgcagtggccatggaggctacggcggcgaccaccacgagcagcaccagcagaagcagcccgcgctgatgtgcgccctcaaggccgcgacggcggccacggccgccgggtcgatgctgctgctatccgggctgatcctggcaggcaccgtcatcgcgctcaccgtggccactcccgtgctggtcatcttcagcccggtgctggtgccggcggccatcgcgctggcgctcatgtccgccggcttcgtgacgtccggcgggctgggcgtggcggcgctctccgtgttctcgtggatgtacaagtacctcaccggcaagcacccgccgggcgccgaccagctggaccacgccaaggcgcggctcgcgtccaaggcccgcgacatcaaggacgccgcgcagacccgcatcgaccaggcgcagggggcttgaagatgaggtgcgtgccccgacgcgcggccgatgcgtgggtgatgaacgatatagcgtacgattgctgatccgtgcgcgcgtttgatcgccgccgtgcccgccgagcgagcaagtcgacgacgtttaccacctgttgtgctatccgaccgagtgcgtgtttagacttttgttgtgaactagttgttctcgtcctagtactctagcagtatgtttccgtggtcgaagtcgggagagggtctggatgctggatgtatggtgtgtgcttgtggatgtctctgcgtttatgatgaataaattgccaagttagggcg

SEQ ID NO: 4643 - DNA, 509 bp, Triticum aestivum
ggcgtcctctactgccacatgatcgagccgcggattgtgcgtcaacgagcggatgatcccgcgccgcctgctgccgttcaggagggcgttcagcggcaccttcatggtgaacggggcgtacgaccgggaggaaggggacaaggccgtcgccgatggctacgccgatcttgtggcgtacgggcggctcttcctggccaaccccgacttgccggagaggttcaaaaggaacgccgctctgaataagtatgacaggagcacgttctacacatccgaccctgttgttggctacaccgattacccttttcttgatcaggaggattagctaactggttggttcacggtcgtcgtgcttgggacttgggagcttctatcatcatcgttgattaagaagtaactccaaggctcacgctcgaccttgcatagcacacaaaatcaggctgggggaatgtttttatgtggtgttagctccagattgtattatggcaggcatctgcagatcccttagaatt

SEQ ID NO: 4644 - DNA, 509 bp, Triticum aestivum
gggctcggtgtcctctactgccacatgatcgagccgcggatgtgcgtcaacgagtggatgatcccgcggcgcctgctgccgttcaggaaggcgttcaagggcaccttcatggtgaacggcgggtacgaccgggaggaaggggacaaggccgtcgccgaaggctacgctgatcttgtggcgtacgggcggctcttcctggccaaccccgacctgccagagaggttcaggaggaacgcggttctgaataagtatgacaggagcacgttctacacatctgatcctgttgttgggtacaccgattacccttttcttgaaacggaggattagctaagggcatgaacagtgattgataagacattcttatcttaatcctttcatgcaatttagagatgacaataaaaccatgtctacgatagagtatgtcttagtcttatcttaaataactagttatttgtaatatatagtgagacatattgtgctaggagatcatctcttaaataagagaaaac

SEQ ID NO: 4645 - DNA, 670 bp, Triticum aestivum
cttggccaaggggaactcgttgaaggaggattgaagcctctacaggttgtcgtgtttttatcagagggaagggctcaattaaagatcctgggaaggaggaacagctgaagggaagacctggttacgaacacttggatgatcccctgcatatcttgattgaagcagagttacctgccaatgtcattgatgcaagactctcaaaagcacaagagatcctagaagagttgttgaaaccagtggatgaatcacaagactactacaagaggcagcaactccgcgagcttgccatgctgaactcaccgctccgagaggagagccctcgtctaagcccgcatccaagtccgcacccaagcccgcatcaaggcggcgcttcacccttcagtaacggtgggatgaaacgaagcaaacaatgactgcagaggcctgctcctcccaactttgacccttccagaaacccgccctcaatcgatgccctcacagcctaatttttcatgagcaagctttcatgatggtgttggcattcgtgcgaaacctgtgttactagtagaattttgatgagtctccgttgtgacattagcctatgatgactgactgagaatgatccatgatagcgaatcctccgcctttataattagaacatttgatttatttgttgctggtaatgctgaga

SEQ ID NO: 4646 - DNA, 500 bp, Triticum aestivum
gcgctgcgcgcgcgcccggccttctcctggcggaagctctggcgcttcacggggcccggcttcatgtgcgcgctcgtgcagctcctctggctgctgctctgggccacggtcatgggcgcgctcgtgcagctgctcttcgcgcgcctcggggtcgtcaccgggaagcaccccgccgagctctgtcgggaggagtacccgccctgggccacacgcgcgctctgggtcgtgacggagctcgcgctcgtcggcgccgacatacaggaggtcatcggcagcgcgattgccatcaagatcctctccgggggcatcgtgccgctctggggcggcgtcgtcatcaccgccttcgatctcgtccaggccgacgccgtggctgccttccgctcgctttgacggcacgacatccttcccgctctgttgctgcgacgccattgccactggctcagcgaggcaggcgactcctggctcttccagcagaagctcgccaccgccgagctcgcctc

SEQ ID NO: 4647 - DNA, 699 bp, Triticum aestivum
cggggcccgcttcctgatgacatcgcgttcttgacccggcaacctcgaggggacctccagccggcccgcgccggggacacgctgctgtgctgctcatgtgggccaaccccaatgggcctcctcgtgcagctcctcccgcgcgcctcgggtcgccaccgccggcacctcgcagagctctgccgtgacgagtaccccgactgggcgcccgcgcgctctggctcatgccgaggtcgccatgtcggcgctgacatccaggaggtcattggcagcgcgatcgccatcaagatccttagcaatgggtatctgccgctctgggccggcgttgtcattaccgccttggactgtttcattttcctttctcttgagaactatggtgtgaggaaactggaagctgtatttgcagttttgattgcaacgatggcagtgtccttcgcatggatgttcactgataccaagcccaatgggaaggatctgttaattggtattttggttccaaaattgagctctaagacaataagacaagcagttggggttgttggctgtgttattatgccccacaacgtgttcctccattcagcgcttgtgcagtcgaggaaaatagacccaaaaaaggagtaccaagtccgtgaagcattgagatactactcaatagagtcaacggtcgcattggctatatccttcatgataaatctctttgtc

SEQ ID NO: 4648 - DNA, 668 bp, Triticum aestivum
cgcgtcgacggcttctcctcgctccccaagcactgcctcacgctctgctacgtcttcttcgccggcgccatcatcatcaacctcgtcagggacttggtgccggccaaggtcgccaggttcatcccgctgcccatggccatggccataccgttctacatcggctcctacttcgccatcgacatgttcgtcggcaccgtcatcgtcttcgtgtgggggatcgtgaataaggccaaggccgacgcgtttgcgcccgcggtcgcctcggggctgatctgcggcgacggcatttggacgctgccgcagtccatcctcgcccttgcaaaggtgaagccgccgatttgcatgaagtttctatcgagatccgtcaatgccaacgtggatgcctacctaggaaattaattagctgtgaggcagttctcctttcttccttgaaaaaaaaaggaaagcatccctgtctatagtttgaagttacacgttctgtactctatcatcatcatcctataatcacgactgtatatggattaattgttacgtatggtgattttgtagctaatgcacataagctttaaggttgtgcttgttaataagtggctatagggatgtaaatggcaaataagcggcgtctacagtcccgtttggttagctttagctagcttcttagtgcattc

SEQ ID NO: 4649 - DNA, 608 bp, Triticum aestivum
tacaaggccttcgacgacatcggcatcagcggcagcgagtaccccgcgccctacgccatcgtctaccgcaacatggccatactcggcgtcgacggcttctcctcgctccccaagcactgcctcacgctctgctacgtcttcttcgccggcgccatcctcatcaacctcgtcagggacttggtgcccgccaaggtcgccaagttcatcccgctgcccatggccatggccatacccttctacatcggctcctacttcgccatcgacatgttcgtcggcaccgtcatcgtcttcgtgtgggggatcgtgaacaaggccaaggccgacgcgtttgcgccggcggtcgcctcggggttgatctgcggtgacggcatttggacgctgccgcagtcgatcctcgctcttgcaaaggtgaagccaccgatttgcatgaagtttctatcgagatccgtcaatgccaacgtggatgcctacctaggaaattaagtcagtgcctgtgcggcagttctcctttccttggaaaaaaaggaaggcctccctgtctatagtttgaagttacacattctgtactgtatcatcatcctataatcacgattgtatatggcctgtta

SEQ ID NO: 4650 - DNA, 823 bp, Triticum aestivum
tcctaacgcagttattactcttcatagtttgatcaaattggaagggtgggaaagcatggttactattatttctagtgacatgcggtgctgggatgctcctgaaaaagctgatattttggtcagcgagttgcttgggtcctttggtgataatgagttatctcctgagtgtctagatggtgcccaaagattcttgaagcctgatgggatttctattccttcatcttacacaagctttgtccaaccagtaactgcatcaaaactacacaatgatattaaagcacacaaagatattgcacattttgaaacggcatatgttgtcaagctacaccgagtagcaagacttgcacctccacaagaggttttctctttcacacatccaaacttctcaccaaaggtcagcaaccaaaggtatacaaagttgcagtttgaactaccacaagacacgggatcatgccttgtgcacggattcgctggatattttgatgccgtactatataaagatgtccatctaggaattgagccgaacacatgtacaccaaacatgtttagctggttcccaatctttttcccactgaggaagcccatatacgtgccgtcagagtcgcccatagaagtgcacttttggcgatgctgtggtgccaccaaggtgtggtacgagtgggctctggtggcgccgtctccttccccaatccacaacagcaatggccgttcgtactgggttggtctataattcgaaaaatcagaatactcgcatgtcgtttcttttgagagaagtgacgatcatatgcttggtttttgagtgcgtccggctacctggatcaaa

SEQ ID NO: 4651 - DNA, 732 bp, Triticum aestivum
cgtcctccggttatatccacgtcggggtttcacacgcctgggacatgcctgagaacaccgttcggttgcttgcctatgctcagttcatgggtatcaaggatcttctcagccagaacgaccgccccaccagttcgcttcatggaaccgacgacctcgccttcgtcgcgacccgtgcccgtgaggtgcacgacttctggcacgtgctgttcggcctcccgaccacctgatcggcgagactgctctcaaggtgatcgagttcgagcagatgttcctcccgatgtgcatgctctctgtcgtcgggggctccgcgaggttcagcgagaagcagaggaggctgttcttccagcactatttcccatgggcgaccaaggcaggtgtcaaggctactgatctgatgtccgtgtactatgagaagcacttccatgaagatctggaggaggtgaggaggaactgggggatcgtaccgtgcccggatcccaagacgacgagcagtgcttagactttaagcaagtgcatttttgcataaaaacgtctgtatcttggtttttcagccttgcttgttgtcagtttctctttgtgagaatgataccatgaattgtgctgctgatatgttagcaagtaaatagggtatggtagctgttggatgttgcttcgtaaggtaatatgcaatgttatccacaaactacttatatgatgatatatcttctcggtttgctcgaacacttatactat

SEQ ID NO: 4652 - DNA, 760 bp, Triticum aestivum
cggaagccagcgttcgagcgtgtgctccagcgcaggaagaacagcgccgaaggcagggaaatcttttcgagcgtcctcgggttaatccactcgggttttcacgcctgggcatgcctgagaacacgttcggtgctgcctatgctcagttcatgggatcaaggaacttctcgccagacgaccgtccaccagttcgcttcatggaaaccgacgaccttgcctttgtcgcgacccgtgcccgtgaggtgcatgacttctggcacgtgctgttcggcctcccgaccaacctgatcggtgagactgctctcaaggtgatcgagttcgagcagatgttcctcccgatgtgcatgctctctgtcgtcgggggctccgcgaggttcagcgagaagcagaggaggctgttcttccagcactatctcccatgggcgaccaaggcaggtgtcaaggctactgatctgatgtccgtgtactatgagaagcacttccatgaagatctggaggaggtgaggaggaactgggggatcgtgccatgcccggatcccaggcgacgagcagtgcttagactttaggccagtgcatttttgcataaaaacgtctgtatctttggtttctcagccttgcttgttgtcagtttctctttgttaacaagtaaatagggtatggtagctgttggatgttgcttcgtaaggtaatatgcaatgttgaccacaaactacttgtatggtatatcttctcggtttgctcgaacgacttataatattct

SEQ ID NO: 4653 - DNA, 600 bp, Triticum aestivum
atgactggattgataaccaatggaagccacgttgcacagaatctgtcaggaacaaaattcacaggaggcgacagggttgaagtgagcagcgacgaggaaggtttccacggagcatggttccaggggacggtcgtcaaatccgtgggacacaagttccttgtggagtacgatgcgctgaaggacgatgacgagaccacgcctctgaaagaaaccataggggaggagcacatcaggccctctcctccggctattcctgtcaccaatggtttcaaggtccttgacgagatcgacgcctacaccaacgatgggtggtgggtcggcgtgatatccgaggtcctcagcaaccagaagtacaaggtttacttcaaggcgtacaaggagcaggatgagtttgagctcgaacagctgaggcgtcactgcgattgggtggggggtaggtggatccaggcttccctggtaacctctactgcctatccgttgccccgcatctaagtttacagttgataatgaaattagcactagtgatgacgatttactgatagctggatagctactacccatgtttgtcccgtcttgacgttcagttaatattattatcat

SEQ ID NO: 4654 - DNA, 996 bp, Triticum aestivum
ctgtgcaatgagattatcaacatcaagcacatcagaccttgcccgccacgtgcatcagttattagtttctgcgtcaatgatgatgttgagggcttccaagatgatggctggtggccagggaagatcactgagatccatcccaagttaacatatacatttaagttagcaacttcaggaaagaaggttcagttacaccagaacacactgaggcttcgatatgactggactgatgaccaatggaagcaagttgcacagaatctgtcgggaacaaaattcacaggaggcgacagggttgaggtgagcagcgacgaggaaggtttcaacggagcgtggttccaggggaccgtcgtcaaatccgtgggacacaagttcctcgtggagtacgatgcgctgaaggatgatgacgagatcacgcctctgaaagaaaccataggggaggagcacatcaggccctcccctcctgctatccctgtcaccaacggtttcaaggtccttgacgagattgacgcctataccaatgatgggtggtgggtcggcgtgatatctgaggtcctcgacgaccagaagtacaaggtttacttcaaggcttacaaggagcagaatgactttgagctcgagcagctgaggcgtcactgcgattgggtggggggaaggtggatgcaggcttccccggcgctggagatgtgacagctgaagggacacacgcatctttgtacaggagcctgggataattagtagtcctacccatgagagtgtggcttcactagttatgatggttgctgaactgaagctgtgttatgcgcatagaaaggccagcaaatcggtagtagatggcctttctgcattgccattcccgcagcaggtgatctagatgagatgttcgtcgacgggagactttcacctttcaccgtcacaagtaagatttcgtcgtgctttttatgtaaaccacctaaggacgaacctctgggtacatcgtcgctattcacgactccgcct

SEQ ID NO: 4655 - DNA, 702 bp, Triticum aestivum
tccggcgcgtgatgcacccgatcgacgtggccgggcgcaacgcgtgcgggcagcacgacgaggcccgcgccatcgcgcgcaccatgccggcgctccgccacctggaggtgggctacatgctggtcactacggaggccatcctggaggtgctctcccggtgccggggcctggagttcgtcgacctccggggctgctgggccgtcgacgaggcgctgctgcgggagcgccacccggggctcagcgtcctcggcccgggcgtcgacgactgcttcgagaacagctactgggaggagtgctccgacgtacgacgatcgactctgacgacgaggtctactcgtgggagctcatggacgtcgtacgagtactacggcgtggtcggcagctgacgtacgacgagccggtgtggggcgacgggccgggcctcgtggagaacctcgaggtgaggttctacggcggcgggttcagcgagagctacgccggcttcgactggccagcgtcgccgtgacagtcccggccgttcgtgtcaccttgaccgcaaaagaagtcaagtatccttttcgttctcgacgttcgtatggtcgttcagatatgtgtgcgtgtgcgtgtgcgtgccagtagcttaatctgggtgtgtgatgtgaacttaatctgatgttaagtttaaaaaaacttaatctgatgtttactacatgaagcaaatca

SEQ ID NO: 4656 - DNA, 708 bp, Triticum aestivum
tcatcaatgattcaggttgctgctagaaatgcaatgaactggatttgatgtgttgagatccatggggctcatgcctatttgatcgatcagttcttcaaaggaccaagtcaatggacgcactgacaatacgcgggagcttagagaatcgttgccggtttggactagaagtagtcgaagccgtagtagatgaaatcggagctggtaaggttgggatgaggctctcgccctttgcaaactactgggaatcgtcagactccaacccgggagctctaggcctgtacatggcacacgcgctgaacaaaattgggatcctctactgtcacacggtcgagccacggatgataacgtttgttgacaaggttgaaactccaaatagccttcgcgccatgcgggatgctttcaagggaacgtttattgtagccggtggctacggcagagaggatggaaacgcagctgtctccagcggctatgctgatctggttgcatacggacgcttgttcttgtctaatcctgacctacctcggaggtttgagattgatgctccgctaaacaagtacaacagagatactttctacatctccgatccagttgttggatacactgactacccattcctttcatccgttgtataaatggttgttttataaatgggctcatccccgctctgaactatgatacccgggcgtattcattgttactgaacctgtt

SEQ ID NO: 4657 - DNA, 603 bp, Triticum aestivum
agtcaacgatcgcaccgacaaatacggtgggagcttagagaaccgttgccgctttgcgctagaagtagtccaggccgtagctgatgagattggagctgataaggtcggcataaggctttcaccctttgcaagttactcggatgcatcagactcaaacccagaagctctgggcctatacatggcacaggcgctgaacaagcttgggatcctctactgccacatggtggaaccacggatggtgaatattggagaaaagcttgagaccccgcacagccttcgcgccatgagggatgctttcaagggaacattcatcgtggctggtggatatggtagggatgatggagataaagcgatcgccgatggctatgctgatttggttgcatatgggcgcttgtttctgtccaatccagacttgccccggaggtttgagatagatggtcctctcaacaagtacaacagagatactttctacctctctgatccagttattggatacactgactacccatttctaccgtccgatatctgaacggacctttcatgaatgaatccctccttcctctcgtccgatcatttaccttacgtatcagaactatgttaatg

SEQ ID NO: 4658 - DNA, 580 bp, Triticum aestivum
tgggcgatggcggagctgatacggaacccgcgggttatgcggaaggcgcaagacgaggtccggcatcaactcgccgggcacgtacaaggtgaggtgtaggccgacctggcagatctgcgataccttgggtttgtcatcaaggagacgctgaggatgcacccgccggcgccattgctgctgccgcgtaggtgcgggagcccgtgtcaggttctgggcctggacgtgccggagggggtcatggtgatcgtgaacgcgtgggcgatcggcatggacccggcgcactgggaggcacccgaggagttcgcaccggagcggttcgagcagaacgggagggacttcaagggggcggacttcgagttcgtgccgttcggcggcgggaggaggatatgccccggcatggctttcgggctggcgcacgtggagctcgcgctcgcggcgctgctgttccacttcgactgggagctgccaggcggggcggcggccgaggatctggacatgaccaaggagtttggcgtcacggcacggctccggtctgaccttgtcgtggtcgccgtggccacggagtaaacgcacttttggt

SEQ ID NO: 4659 - DNA, 592 bp, Triticum aestivum
catcaccgagatcaccgagcaggacctggagcgcgtgttccgcaccaacatcttctcctacttcctcatggccaagttcgcggtgaagcacatgcggcccgggtccagcatcatcaacaccacctccgtgaacgcgtacaagggcaacgcgacgctgctggacacacggccaccaagggcgccatcgtggccttcacccgcgcgctgtctatgcagctggcggagaaggggatccgtgtcaacggcgtcgcgccggggcccatctggacgccgctcatcccggcctccttcccggaggagaaggtgaagcagttcgggtccgaggtgcccatgaagcgcgccgggcagcccagcgaggtcgcgcccagcttcgtcttcctggccagcgagcaggactcctccgagcatctccggccagatcctccaccccaacggtggcaccatcgtcaatagctagatcagggatagagaagatcgcgaagaacaagagtgaagtgtgtccgtggtgtggtgtgtggtatgtacgaggcaagtgcggcgtgtcgagtctcgagtgtcagctggtagtagttcggttgtgtgttcggtaggg

SEQ ID NO: 4660 - DNA, 568 bp, Triticum aestivum
gaagcacatgcggcccgggtccagcatcatcaacaccacctccgtgaacgcgtacaagggcaacgcgacgcttcttgactacacggccaccaagggcgccatcgtggccttcacccgcgcgctgtcgatgcagctggcggagaaggggatccgcgtcaacggcgtggcgccggggcccatctggacgccgctcatcccggcctccttcccggaggagaaggtgaagcagtttgggtccgaggtgcccatgaagcgcgccgggcagcccagcgaggtcgcgcccagctttgtcttcctggccagcgagcaggactcctcctacatctccggccagatcctccaccccaacggtggtaccatcgtcaatagctagatcgaggttggagaagctcgcgaagaacatagtgaagtgtgcctgtggtgtgtggtctacgagcaagtgtggcgtgtcgagtctcaaagagtgtcagctggtagtagtacggctgtgtgtgcggtaggggcttttggcgctgtagccgcgggaagcgtcaagcgttaaataaataatgtaacgtgcatgcaatgc

SEQ ID NO: 4661 - DNA, 628 bp, Triticum aestivum
cctaattataattaatttaagtacaatacatggattcgccttagcccactcactggagctatacttgattgtgacactcgagcacgtactaccctccgactgcatctcaatcggtttgacttcaccttctatcacagcccgatgacgttcctggaggtggtgacgccgccgtccacgacgaggttgtgcccggagatgtacctcgactcgtcgctggccaggaacagtgccgcctctgcgatgtccctggctctaagagtcgggcccttgagcgtcgccatgccccgcaccatctcctccgtcttctccacctcctccgcgctcaccggcgccggcagcgcgcccccttcctcgtcctcgccatgacgccacgcgttcaccagcattggcgtggccacgccgaagggggagacgcagttcacccggatgccgtgctccccgagctcgcaggccgcgttcttggtcagccccaccagcgcgtgcttcgacgccgtgtacgcgtgggggcccatcccgccgagcacgcccgccacgctcgccacggacacgatgctcccgccgccgcggcgcagaagcatggccgcgccgcgtgcttcatgccgagggccgcgccgagcgtgttcacgcc

SEQ ID NO: 4662 - DNA, 719 bp, Triticum aestivum
agtggaaaacccagtcacctcagttttggtccatgtactcttcatcatgctcgtcttctatccagaccttatccttcccaccatcttcctctacatgttcttgattgggctgtggaattatcggttcccggccacgtgtcccaccacatatgaacacaaggatatcctatgcggatgttgctcatccagacgagcttgatgaggaatttgacacgttcccaacctccaagagcgccgacctgattaggatgaggtatgacaggctacgacacgttgcaggcaggatacagacagttgttggcgacatcgcaactcagggtgagagattgcagtcactgctgagctggagggacccaagagcaacagccatgttcttattattttgcctcttcactgcaattatactgtatattacaccatttcaagtgatttcgctctgccttggcttcttctggatgaggcacccacggtttcgccacaaggtgcccgcagcgccagtaaacttcttcaggaggctacctgcaaagacggactcgttgctgtaaaggtccttggacatgagctaccaatgttatgttacacttctttgtatctatttactagtatgtaaactagtactgttgtacaatagctttaggtaatactaatatctattgttgttgttgtaccatgtgagacagcaaaataagtcgagttgataattttgtggttaaaagtta

SEQ ID NO: 4663 - DNA, 857 bp, Triticum aestivum
ggaaatgctacgccaccaggctgtgcagcttgttgcacagcgcctggggcgcatggaaccaccagttcgcagggaagttgttgagttcatgtcagacgcacgctctcacctgtggagcatgcgacgaagcaaagcaaacttcttccgtctgatgcaagtcttctctggattcattgctgcagggaagtggtttggtgacgtttgccagtggaaaaacccagtcaccacagtcttggtccatgtactcttcatcatgctcgtcttctatccagaccttatccttccgacgatcttcctctacatgttcttgattgggttgtggaattatcggttccggccacgtgtcccaccacatatgaacacaaggatatcttatgcggatgttgcgcatccagacgagcttgatgaggaatttgacacgttcccaacctcgaagagcgctgacctgattaggatgaggtatgacaggctacgacacgttgcaggcaggatacagacagttgttggcgacatcgcaactcagggtgagagattgcagtcactgctgagctggagggacccaagagcaacagctatgttcttattattttgcctgttcactgcaattatactgtatattacaccatttcaagtgattgcgctctgccttgggttcttctggatgaggcacccacggtttcgccacaaggtgcccgcagcgccagtaaacttcttcaggaggctacctgcaaagacagactcattgctgtaaaggtccttggacatgagctaccaatgttatgtcacagttctttgtatctatttactatgtaatactgttgtacaatggcattgggtaataatatctattgttgtac

SEQ ID NO: 4664 - DNA, 516 bp, Triticum aestivum
  N_region (73)..(73): n = any nucleotide
tctcatgtcccagcgctggtttactcatgcttcgccaacccttttcaatgctggcaccccgagacctcagttncgagcagctgtttccttatgcgtgcatgaaagatgatagcatcgagggaatctatgatactctgaaggaatgtgctgtcatcagcaaatctgctggagggattggcgtctctgttcacaacattcgtgctactgggagttacatccgaggaacaaatggaacatccaatggaattgttcctatgttacgtgtcttcaatgatactgctcgttatgtagatcaaggtggaggcaagagaaagggtgcctttgctgtatacctggagccctggcatgctgatattttcgagttccttgatttgaggaagaaccatgggaaggaggagaaccgcgcaagggatcttttctttgctctctgggttcctgatctattcatgcaaagagtacaaaataatgaggattggtacctgttttgtccaaatgaagcctccggggttggctgag

SEQ ID NO: 4665 - DNA, 691 bp, Triticum aestivum
aaatctcggagagaggagcaaaaagaaagatcccacgacagcgacgagtaggaggaggattcgtggcagacgtacgttgacgagcagctgctctgcggacatcgacggccagcgcctcaccgccgccgccatcctcgccacgacggcgccgtctgggcggagtctgagtccttccccaaggtcaaacctgaagaaattactgcagtaataaatgacttcgatgaaccaggctctttggcaccaactggattattccttggtggtacaaagtacatggttattcaaggtgaacctggggctgtcattcggggcaaaaaggggtcaggaggggttacaatcaagaagacgagtctggccatcatcattggaatttacgaggaaccaatgactcctggacagtgcaaacatggtggtggagaggctcggtgattaccttcttgagcagggcttctgaactcaagagtcctagtctgggccaactgggcttatgcctaccgaaatgtactaccgcataccccatgaataattggacacatccggatatgttttgaacaagtggaggttcctcgttatgttggaattgcttcctatatgtcatggggcttatatgtaacctttaaacgtcgtcatatttttgccgagcatccagtttttcctgttactgacatatcctgcaatgtatcaacatgcg

SEQ ID NO: 4666 - DNA, 832 bp, Triticum aestivum
aaagacccgttgttcctctgcgccggcgtggggagaactctgtcccccatcgtcgccgagctcaccggcctcggcctgttgcgttccgagatcgcgcgtctggtctcgctcgcccgcagcgacttccgccgcagagccatagtctccaacctgcagtactgcctgcatctcttcgggtccttccagaatctcttcagagtgctcaagaatggttcctaccttctgtcgtcggacctcgataagttggtcaagcccaatgttaccttcctgagggagtgcgggctaggtgattgtgatattgccaagctgtgtattgctgtgccgaggatgctgactaccaacccagagcaagaagaaatgccaaattttcaactactagcagaagaaataggaagttcacttggttaaatagaaccatggtccgcctaccttgaaattgatgtaccaggagcctaggaggatgccggtaggtgtttggttttggtgcaccaccaaaaaaagcttgctgatgggatgcaaaggctaaggtaatgaactatcaactgtacacgtgaggtagaaggctacgcctactgtactgccagctaaaatataatgcctattccatcaaaaagaaaaatgtaatgcctacctgaaccatcttagaaccgtgacttgtgttgatatttttagttccaacttcaaaatgatggctatactgttctgaatttttaggatatcagcagttgtttgtatctttgagtgtctaattccaagttgaaatcgagattgttaactgctgataagctgaaggtagtactaattgccatctttatttccgtttgacaaatag

SEQ ID NO: 4667 - DNA, 663 bp, Triticum aestivum
  N_region (450)..(475): n = any nucleotide
gcagagagcgtgtacaatgccgcactggcccttggcattgccaaccagctcacaaacatcctccgagacgtaggagaagactcaagaagggggagaatataccttccactggacgaactggcacaggcgggtctgacagaagaggacatattcagagggaaagtgacggataaatggaggaggttcatgaaggggcaaatccagcgcgccaggctcttctttgacgaggccgagaagggcgtcatgcatctagactccgcgagcagatggccggtcctggcatcgctgtggctgtacaggcagatcctggacgccatcgaggccaacgactacaacaacttcaccaagcgcgcgtacgtgggcaaggcaaagaagttcctgtctctaccggccgcgtacgcgagggcggctctctcgccatgagcaaagcaatcccgtagatcagatgtnnnnnnnnnnnnnnnnnnnnnnnnnntgtcctgtcaccctacaatgatttttgttggctgttgtatatactcagctatatgtttgccatacgcccgccgcggtatttaggtcaagggaccgacgtcgggccccgctgtactgaagtctgaaacacttgttgttaccacacagtggagaatcaaaattgctccagttgaatgaagaagaaacaaa

SEQ ID NO: 4668 - DNA, 771 bp, Triticum aestivum
  N_region (570)..(570): n = any nucleotide
  N_region (573)..(574): n = any nucleotide
atcgaggtatatgacctttgacgagctttacctctactgctactacgtcgctggcactgtcggtctcatgacggtaccggtgatggggattgctccggactcaaaggcctcagcagagagcgtgtacaatgccgcactggcccttggcattgccaaccagctcacaaacatcctccgagatgtaggagaagactcaaggagggggagaatataccttccactggacgaactggcacaggcgggtctgacagaagaggacatattcagagggaaagtgacggataaatggaggaggttcatgaagggccaaatccagcgcgccaggctcttctttgatgaggccgagaagggtgtcatgcatctagactctgcgagcagatggccggtcctggcatcgctgtggctgtacaggcagatcctggacgccatcgaggcgaacgactacaacaacttcaccaagcgggcttacgtgggcaaggcgaagaagtttctgtctctaccggcggcgtacgcgagggcggctctttcgccatgagcaaagcaatcctgtagatcagatgtttttttatnctnntttttctttcttattttgtcctgtcaccctacaatgattttttttggctgttgtatatattcagctgtatgtttgccatacgccctcgtcggtatttaggtcaagggaccgatgtcgggtcctgctgtactgaaagtctgaaacacttgttactaccacagtggagaatcaaaattgctccagttgaatgaagaaga

SEQ ID NO: 4669 - DNA, 518 bp, Triticum aestivum
agaggctcagcatcaggggccgcgtctacccggcgatcctgcccgtcgacggcagcaaagtccccgggaaggtttggaaggggatcactgacagggagctcgatgtgctggacatctttgaggatgaggagtatgtcagggaaactgttggcatctcgctgaccgattcggcggacacaatgatcgcctacgcatacatatgggggaatgtggatgatcctgacctctatggtgaatgggattttgatgaatggaagaaagtgcatctgaaggactatctcacaatgacacaagatttcaaggaggaactggaacagcttgaatctgagacacatgattgaagcttgccaatcattcttccagaaggattaattcgccaatttattgtatgtgctttgttcaaccagctctaatgtgaattgtaaataagatattcatcggattgccatcaacctagcaaaaaagaaaatagttttcatatcttgtgacgaccatagactcgagagtgttcaagtcta

SEQ ID NO: 4670 - DNA, 690 bp, Triticum aestivum
gaaaaccgagaaatcaaagacttcagacgcaaggactgcgtgcgatgtgggcgacggggtaaacgactcgccggccctgccgcagcggacgtgggcatggccatcggcgcgggcacggacgtggccatcgaggctgccgacatcgtcctgatgaagagcagcctggtggacgtgatcaccgccatcgacctctcgcggaagaccctcgccaagatccggctcaactacgtctgggccctgggctacaacgtcctgggcatgccgatcgccgctggcgtcctgttccctttcacgggcatccggctacctccctggctcgccggagcctgcatggcggcctcgtcggtgagcgtcgtctgctcgtcgctgctgctccagctctacaagaagccgttgcacgtcgaggacgtgccgataccagcaggacccggcgatggtggctcgaacctggtgtgaggagcacgcgcccgttctcgcggtgctactgacgaaactgttgctgtcaacgttagtgggctgcggctaattgctggcatgcatcaagccttgaactgacgcggattgaaaacgtgtggccctcctgattgattcgtgtgcatatgtaatttcacgcaaccattttccttcctttttgtgcggaatgattattttgataataatatgggaggttcatcctagaaacggaactat

SEQ ID NO: 4671 - DNA, 794 bp, Triticum aestivum
  N_region (646)..(646): n = any nucleotide
gtgaacgtctcctccaattatggactgctaagacatatcggcagcgaggaggtgaggcaggagctcaacgacgtcgacaacctgacagaggggaggctagacgagctgctggagaagttcatgaaagacttcgaggccggcgcgctggagccgcacgggtggcccacaaagttctcggcgtacaaggtggccaaggccgccatgaacgcctactcgaggatcctggcgaggaggcaccctgagctgcgcgtcaactgcgcgcaccctggcttcgtcaagaccgacatgagcatggggtccggggtcctgacgccggaggagggcgcacgtaacttggtgaaggtggcgctgctgcctgacggcgggccgaccggcgcgtatttcgccatgggcgaggaggcgccgttcgtgtgaggtaccggcggtacgtgcgtgcgtgccgtacggttactgcttggatgcgttaaaaaaaaataagatgtgtcatctatcttttttcgacaaagggtgaggttcacagcggcagcgtccgccacctccaatgcatgacacgtgttcagtgagggctcgtataccgtccttcattgaacgcgcttttgcaacagaggtaatgtttctgaaacatatgtgatattgcagtagtttncgacaagtctatgttctataacaaaacatcggtcgtgaaaattttctgcaaccatacctcagttgcaaaaaaaaaaattgcaacaagatcccagttgaaaaaaatgcaacaaagcatctgctgtaaaaaaattctgaaacaagaccta

SEQ ID NO: 4672 - DNA, 620 bp, Triticum aestivum
gcgtgcgacttcggcggtgccggcaccattgtcaaccaggcaccatcaggccgctgcgaccttagcccgagctggtgtgtcgcgaacgcagcggtgggcgccgcacggctgcagaacgcgctggactacgcctgcggtcatggcgcggactgcactgacatccaacctggagcacggtgcttcgatcccgacaccaaggtcgcccatgcgtccttcgcgttcaatgactattaccagcgccataaccaggccgccggaacgtgcgacttcgccggtgccggtaccattgtccggcaggcaccaaagataggcaactgcgtgctgccgtcaagggcctgaactgaagaaactgtagccaaagcgaagctttactaccacgagattaagcaataatcccgacagattattgtctgctgccggcaaagtctagttttcaaatgtaaaactgcatgcttttcatcaggtgcttagagcaagtacaataatgggcttatagcctggttacgtgtcacttttgcctatgtgaaaaggagtgatgtggaaaaatagtgggagaggactctcatatagagcctagctctatgcttactcctaggcaattgcaataaatatgaagaaag

SEQ ID NO: 4673 - DNA, 640 bp, Triticum aestivum
actactaccagaagaacggccagaccaacagcgcgtgcgacttcagtggtgctgccaccattgtcaaccaggcaccatcaggccggtgcgacccgagcccgagctggtgtgtggcgaacgcggcggtgggcgccgcgcggctgcagaatgcactggactacgcctgcggccacggcgcggactgcacggacatccaacccggagcacggtgcttcgatcccgacaccaaggtcgcgcatgcgtctttcgcgttcaatgactattaccagcgccatggccggggcgccggaacgtgcgccttcgccggtgccgctaccattgtccggcaggcaccaaagataggcaactgcgtgctgccgtcaagggcctgaactgaagaaactgtagccaaagcgaagctttactaccacgagattaagcaataatcccgacagattaccgtctgcggccggcaaagtctagttttcaaatgtaaaactagataaataaatccatggttttcatcaggtgcttagagtaagtacaataatgggcttatagcacggttacattacacttttgcctatgtgaaagagagtgatgtggaaaaatagtgagagaggactctcgtacaaagcctgagctatatgcttactcctag

SEQ ID NO: 4674 - DNA, 629 bp, Triticum aestivum
cgcctcgtcgcatcgggctcgaccccgctggccatcgcgtcgtatcccaaggcccccttctccaggccgcgggcggcgacgccatgtgttcgatctgcctctccgagtacatggacggcgagatgctacggctgatgcccgagtgcaggcacaggttccacgtcatgtgcctcgacgcctggctgcgcaggagcgcgtcgtgccccgtttgcagatcgtccccaatccccacgcccgtcaccacgccgctcgcgacgccactctcggagctcgtcccgctctcgcaatacgccgctgaccggcggcgcagcaggtgacgggtagtctacatgggtgcacctcgctgctcttcattgttactcctcttttttctttttgcgttgaaaagggttctgtaaatttgtcgattgtatgattggtaaggacacataaggagttttaggtgctagtacgactggtggtgtgcttaggatttgtaaagagttgcttggttcccattactattacttcgagaaaattttgtaatgtagaagtagatgacgggtttctcgaaaaaaaagtagatgttggagcaggcatagttgtgaatacagtgttgctggtttgccttattgtgaaatgttaaatta

SEQ ID NO: 4675 - DNA, 746 bp, Triticum aestivum
  N_region (646)..(670): n = any nucleotide
cacgccgcgagcggaggtttgcccgagccatggacgactccggctcgtgcttctcttccgggacaaggcgtacctccaccccgagaaggttgtggacctggtcagaaggcggtccgcttgcactcgcaccagacaacgacacgagacaggcagagtttaagcagctccaggaaaagaaggaagagatcgacaagctggcacacaagcaagtccggcgagtcctgtggactggcttagggttcttcatgctccaggttgggatcttcttccgtctcacgttctgggagttctcatgggacgtgatggagccgattgccttcttcacgaccacctcggggctgctggttggctatgcctacttcgtcatcacctcaagggacccgacgtatcaagacttcatggagaggatgtttgagtcgaggaggagaaagctttgcgtgaagcatggtttcaacatggagaagtacctggagctgcagaaacattgcaagtgccctctggaaggccatcattctcaggggcatgactcgcaacacctgagctaaagtttctcagttgtttcttgatgctgacagtgtcatctctagcttttagaagagcggccgtttgcattatcttatactgagtttgtattaccaaaagtcgnnnnnnnnnnnnnnnnnnnnnnnnnccagctgtcacctaacaggttaaacctaacagtttaagcttatttagccctgtgtgtatcaagtgggtgtgcgagc

SEQ ID NO: 4676 - DNA, 745 bp, Triticum aestivum
ttttaaataagcttaaactcttaggtttaacctgttaggcgacagctggtttatgtaaatatatatatatcactttggtaatacaaactcagtataagataatgcaaacggccgctcttctaaaagctagagatgacactgtcagcatcaagaaacaactgagaaacttcagctcaggtgttgcgagtcatgcccctgagaatgatggtcttccagagggcacttgcaatgtttctgcagctccaggtacttctccatgttgaaaccatgcttcacgcaaagctttctcctcctcgactcaaacatcctctccatgaagtcttgatacgtcgggtcccttgaggtgatgacgaagtaggcatagccaaccagcagccccgaggtggtcgtgaagaaggcgatcggctccatcacgtcccatgagaactcccagaacgtgagacggaagaagatcccaacctggatcatgaagaaccctaagccagtccacaggactcgccggacttgcttgtgtgccagcttgtcgatctcttccttcttttcctggagctgcttaaactcttcctttctcgtgtcgttgtctggtgcgagtgcaagcggcaccgcccttctgaccaggtccacaaccttctcggggtggaggtacgccttgtcccgaaagagaagcacgacgccagcgtcatccatggcccgggccagcacctccgcctcgccgcgcgtgcgggccgcgccgacctcgacgcag

SEQ ID NO: 4677 - DNA, 692 bp, Triticum aestivum
ctctgatgctgagctcccaaattgctgaagacttagctagagcatttactgagcggacaattttgcaaatatttttggaggatgagatgaatgctcctgctggttctttaaaggatgtattggggttactgaggtctatgtatgtaatggtgtgcatagacgaatctgcatcttttctgagatacggttatttgtcgcgggacaatgtagccaccgtgaggaaagaagtcatgatactgtgcagtgaactcaggccccatgcgcttgctattgtcgattctttcggaatccctgatgcctttctcagtccacttgctttcgactggatcgaagcaaatgctctatcttccgggagcgaatgactatacaccttcagacccccaatgaggacgtagccccgtaaatgttaaactattacagatggggcagccaaatgcagattactaaacaaagacaggtgcataatgcatttggtgcttcatgtggtttacacagtttataataatagttgttgaagtgtacagtcgaagatgctgatctgcgcagaaaatagggaatttggtgtatgcatcagttcatgtattgtcttgtctaaattacgccaataaaactgaataagctgatatggcccaggggctcactgttgtaaattagtgtacactattgtttgttttggtttttattctttcttt

SEQ ID NO: 4678 - DNA, 863 bp, Triticum aestivum
  N_region (128)..(128): n = any nucleotide
  N_region (160)..(160): n = any nucleotide
gggataaatcctgcctttatgttggctatgtgcatatggctagatggatttgtcctgcttgagggagcgggatttactgaaacagttcgcagaggaggtagctcgccatctggcacaaggggaaagcngagaaagggctctgatgctgagctcccaaatngctgaagacttagctagagcatttactgagcgcacaattttgcaaatatttttggaggacgagatgaatgctcctgctgggtctttaaaggatgtattggtgttactgaggtctatgtatgttatggtgtgcatagatgaatctgcatcttttctgagatatggttatttgtcgcgggacaatgtaaccaccgtgaggaaagaagtcatgatactgtgcagtgaactcaggccccatgcgcttgctattgtcggttctttcggaatccctgatgccttcctcagtccacttgctttcgactggatcgaagcaaatgctctatcttccgggagcgaatgactatacaccttcagacaccaatgaggacgtagccccgtaaatgtgaaactattacagatggggcagccaaatactgattactaaacaaagacaggtgcataatgcatttgctgcttcatgttgtttacacagtttacaataatagttgttgaagtgtacggtcgaagatgctgatctgcgcagaaaatagggaatttgatgtatgcatcagttcatgtattgtcttctctaaattacgccaataaaactgaataagctgatatggcctgacaggggctcacagcgtaaatagtgtacacaatgttgtttgctgtaaattctttcttttttgacatatgttgttgaaccgtacacaagcataagc

SEQ ID NO: 4679 - DNA, 671 bp, Triticum aestivum
gcgacaccgtttaaatcgctggacaatggcggacaagcttgagcctgtccataatgttcttgggagcagcacaaacccaagatgcctggatttagctatactgaacgtgacacagatgacggcacagcgaaaagatggtcacttgtcagtgtacatcagcccttcggggcctgtccccctgcgtagacaggattgcagccattggtgcttgcctggagttcctgatacctggaacgagcttgtgtacgccgtcttcatgaaaaggcaaacgatggtggaccaaaatgtttcccttgctgcttccagaacgctgaacacaagttgactaaaattctatgggtaggctacccgatgctcgcccggtgaagctttgtatctgaggttggttggtgatcctcctgcactatgattttgcaagataggagctggcttgtaggaagttgtaccactctaatctgttgtatgttgagaggagagtgcaaataagagcaaaattaaagaaaggcataccactatgtttcacagaggcagccaaagttttagccgatgtgatcatagattagaggggctgcattcgatgatgtacatagtttattactttatttggctgctgtcatattgggggagttaccgtggtgattgtatgtaattcaggaattttatcctcaaag

SEQ ID NO: 4680 - DNA, 655 bp, Triticum aestivum
gacatgacgcggggatggtggtttcgtctgctgcgctgatggagtatccgctctgggtgatgaacgtggtgccttcaggttctgctcctgacgccctcggtgttatctacgagcgggggttcattggaacgttccatgactggtgcgaggctttctcgacgtatcccaggacatatgacctcatccatgctgataaagtgttcagcttttatcaggacaggtgtgacataacatacatcctcctggagatggaccggattctgcggcctgaagggatggtgatcttcagggacaccgtggagatgttagtgaagatacaagccatcaccggtggcatgagatggaagagccagatcatggatcatgaatccgggccgttcaaccctgagaagatccttgtggccgtcaaaacttactggactggggagcctgcccaaaagcagcaatagtcgttcgacgtcatctcctgcaaaagtccagacagaaaacctttctgtcgagtcttcatcgactgttctctcttagcttcaggatatatctgtatatagtaggtgggcattcgctgtatcatcatcggtttaattttgtggtctcgactcgcaagctgcgttgcgttgttgcgagtagtgagtgtgacacggtgcgatggtgtata

SEQ ID NO: 4681 - DNA, 652 bp, Triticum aestivum
tgctgcgctgatggagtatccactctgggtgatgaatgtggtgccttcaggttctgctcctgatgccctcggtgttatctacgagcgggggttcatcgggacattccatgactggtgtgaggctttctcgacgtatcccaggacgtatgacctcatccatgctgataaagtgttcagcttttatcaggataggtgtgacataacatacattctcctggagatggaccggattctgcggcctgaagggacggtgatcttcagggacaccatggagatgttagtgaagatacaagccatcaccaatggcatgagatggaagagccagatcatggatcatgaatccgggccgttcaaccctgagaagatccttgtggccgtcaaaacttactggaccgcggagcctgcccaaaagcagcaatagctatcgccttcctcagtgttgttctatgtcgtctgctgctaaagttcaaacagaaaacctttctgttgagtcttcattgactgttctcttagcttcaggatatatctttagatagtaggtgggaattcgctgtatcatcatcggtttaattttgcggtctctgactcgtgagctgtgagtgtgacacggtgctacacgatggtattcagcaaccgttccaagaggatattc

SEQ ID NO: 4682 - DNA, 634 bp, Triticum aestivum
aggcaccagattaacagcaggactgtgaagataccgagaatgtgatgtgtatggatttggagttcttgtgctggaggtcatgacagggaggacaccagtggagtacatggaagatgatgttattgtactgtgtgatgtggtgagggctgctttggatgaaggcaaagtggaagagtgtgtcgatgagaagctctgcggaaaattcccactggaagaggcggttcctatcatgaaacttggcttagtttgtacttctcaggttccctccaataggccagacatgagtgaggtggtgaacaattggagttgatcagatgcccacaggacagcccagaggccgagttaggttaagctctatctcctttggcccccttctcgtcaggccttgtttcattttgggtatccttctttgcttggtagtcatttaagcattctatctagtgtgctttaggtagtaggagcagagtgccaagtgccaacctagtcttcgataggcaagaaattatgtactgtaatgcattccaacggtctcatggcctatggctgttgatgtgtttgactttgatcctcatcagtatgatgcctgttgtggatcctctcacatcagttttataagcatgagacttatttcaaa

SEQ ID NO: 4683 - DNA, 658 bp, Triticum aestivum
gataaccgagaaatgtgatgtgtatggatttggagttcttgtgctggaggtcatgacagggagggcaccagtggagtacatggaagatgatgttattgtactgtgtgatgtggtgagggctgctttggatgaaggcaaagtggaagagtgtgtcgatgagaagctctgcggaaaattcccactggaagaggctgttccgatcatgaaacttggcttagtctgtacttctcaggttccctccaataggccagacatgagtgaggtggtgaacatattggagttgatcagatgcccacaggacagcccagaagccgaattaggttaaggtctatctgctttggccctcttctcgttggggcttgtttcattttgggtatccttctttgcttggtaaccattaagcgacgaaagacaaggaagttctatctagtgtgctttaggtagtaggagcagaatggcaagtgccaacgctagtctttgataggcaagaaattatgtaatggattccaacggtctcatggcctatggctgttgatgtgtttgactttgatcctcatcagtatgatgtctgttgtggatcctctcacatcagttttataagcatgagacttatttcaaaagtattcgtatttttgtggtgtcttgtccacaagttgtc

SEQ ID NO: 4684 - DNA, 659 bp, Triticum aestivum
ggagacaatcctaaacctgggaaagcaactgaaagcacttgcatcgccaaaggatgccacctcggttcgtccagagcgaaaacctcggtccaagtcactgaatgagatgctagccgtcgacgacgggggatttgatgacctcagctccccgaagaccaaggagattatatgctcagaaataaggccaccacatgaaagaaaattttcggccgacgggggaggtgacgattcagaatcgtgttattctcacccagcaccggtggctccacccgccaagccttccgttgtgagcggaagctgcaagaaagaagccgccgccaaggccgtatcactagccgttgtcccaagcaagcagaaggggaaccccacttgctcaagaggatcctgacaggaaggaggagggatgccataatcaaccaaggtggtcctgagtgcttagctgacagagaccaagggtaactatatccatgataaattccatttccatgtgtaaattaagcgtgtatcagttacctgttgagctgtgtttcttgtcaggtttaggaagaaccatggagtgtggatgccgtgtatgtattacaagtattagtgtgctttgtagcgttgtggccagcattaccctgttccttaggtgtatgaacttgtgtttgctcttggat

SEQ ID NO: 4685 - DNA, 655 bp, Triticum aestivum
agcactgcatcgccaaagatgctacctcggttcgtccagagcgaaaacctcggtctaagtcactgaatgagatgctagccgtcgacgatgggggattcgatgacctcagctccccgaagaccaaggagattatatgctcagaaataaggccaccacatgaaagaaaattttctgccgaccagggaggtgacgattctgaattgtgttattctcacccaacaccagtggttccacccgccaaaccttacggtgtgagcggaacctgcaagaaagaagccactgccaaggccgtatcactagccgttgtcccaagcaagcacaaggggaaccccaacttgctcaagaggatcctgacaggaaggagaagggatgccataatcaagccaaaggtgatcctgagtgcctagctgacagagaccaagggtaactctatccatgataaattccatttccatgtgtaaattaagcgtgtatgtatcggttgcctgttgagctgtgtttcttgtcaggtttaggaagaaccatggagtgtggatgccgtgtatgtattacaagtatcagtgtgctttgtagcgttgtggccatcattaccctgctgcttaggtgtatgaacttgtgtttgctcttggatgtggctaatttatgagtagcatgc

SEQ ID NO: 4686 - DNA, 619 bp, Triticum aestivum
cgctggcaaacagtttaccaggcagcactcgtggcgaattcccttttcactacatgctacaagtacaacatgcaagtagagaatgcaagtgtccttttgttacttgccgaaatacatagaaagtccgacacgcggtccttggcctcccttacgcattagccagccaatcgttttgcaagtcgtttaatttggatctgcttgaagcttcagccacactcactcttgctgaactgtggctagctctcggatcaaaccacgcgaagagggcctcaagtcttgtttatcaaagccttcctatgatcctcggccatggcggtcttgagctgcgtgctcggtctcagatagtcttagcaaatgtcacttaacagatccagaattttcagtttctgaagatccctgtgctgttctggaccctctaaatcaagcggctgaagatctgcaggttttagagtaccacgagatggcggcagaggcgtactatctcaaggcgatgacgtataaccacctgggcaaggaatatgagagggaggaagctgcggtttgtttcaaggagcacgtcactgccctcgagaacccgtgcgacgaggaggattcacttgcttactgaccttgcacagtt

SEQ ID NO: 4687 - DNA, 673 bp, Triticum aestivum
caacatggcgcttgccctcgcctccccaatggcgtccctctcgctccactccgggaggatctcggcgctggctatcggcggcggtctccgcccccacaaggcgggccctatgggggcctccgcatccccgtttctccggagctcattcatctcctcttcctccacctcctccgcccccacctcctcgctctcggctgcggtctcggcgtcgctcgccttcacgtccgcctcctcgttcggcggttcatctttgggaattgagttcagctacaacagattaacaacacgcagaccccgcggtctacagattagggctggaaaggctgccctctgcctgaccaagaggtcaagatctaggaagtcacttgcccgtgtgcatggtttccgaaagcggatgcggactactgctggaagaaaggttctgaagcgtagacgtgacagaggaaggaagattctctgcacaaagtcgaactcacccactgggacaaagtattgattacagtgtaatgtgaggcattatgtattccagctgtaagtttactctttttgcaccccatgttctcagccatgttcatctgtaacaattgctgcacatcttttccctgtactttggttaataacttgatatctgaactaaattccgacactcgtgtaatttatcctttttggttgt

SEQ ID NO: 4688 - DNA, 684 bp, Triticum aestivum
  N_region (158)..(158): n = any nucleotide
  N_region (164)..(164): n = any nucleotide
gctgcacagacatggcgcttgccctcgcctccccaatggcgtccctctcgctccactccgggaggatctcggcggtggctatcggcggcggtccccgcccccacaaagcgggccctatgggggcctccgcctccccgtttctccggagctccttcatntcctcntcctccaccacctcctcgctctcggctgcggtctcggcgtcgctcgccttcacgtccgcctcgtcgttcggcggttcatctttgggaattgagttcagctacaacagattaacaacacgcagacctcgcggtctacagattagggccggaaaggctgccctctgcctgaccaagaggtcaagatccaggaagtcacttgcccgtgtgcatggtttccgaaggcggatgcggactactgctggaagaaaggttctgaagcgtaggcgtgacagaggaaggaagattctgtgcacaaagtcgaactcacccactgggacaaagtactgattacagcgcaatgtgaggcgttatgtattccagctgtaagttttactctttttgcaccccatgttctcagccatgttcatctgtaacaattgctgcacatcttttcgctgttactctggttgataacttgatacctgaattaagttccaacaccggtacaatttatcctttttggtagtggcagtctttaatg

SEQ ID NO: 4689 - DNA, 685 bp, Triticum aestivum
gagaaacaagaaggggtttccaatccttttgctggtcagatccagttaacttctttggaaaaggtcctcaagacggaatctaatggatactgatgtcaaccagaggaaaaatgttattacgagaggagtcctttcagtaactgttatatctgcagaggacataccagcaatggatgtgatggggaaggctgacccgtttgtcgtcctgtacctgaagaagggggaaaccaaaaagaagactagggttgtgactgagacgttaaatccgatatggaatcagacatttgattttgtagtagaagatgccctgcatgatttgctcattgtggaagtatgggaccatgatacatttggaaaggattacatagggagatgcatcttgacacttaccagggcgatactcgaaggcgagttccaagatacatatgtgctgcaaggtgctaaatctggaaagctgaacctgcacttcaggtggacggcacagccaatctaccgtgatcgtgacagggaccagtgaaacctgcatagcttcacacgataagactgccttcttcctctacgatgcctgtatattagcctttcaatacacggatccgcttgggtcttgtaagttgtaaccgtgtatagagactactttgtgattagtcataaatatcgttctacatatgtcccggataaatataaa

SEQ ID NO: 4690 - DNA, 665 bp, Triticum aestivum
gtacgtgcacctcgagaaccgtgccgctttcgtggagtaattgatgctatagtccatgagattggtcggatcgcgtaggcatcaggttgtctccattcgtggactacatggactgcttcgactcggacccacatgcactcgggatgtacatggtacaacagctcaacaagcatcaagggtttgtctattgccacatggtagaaccccggatggcaattgtggatggtcgcagacaaataccccacgggcttctgccattcaggaaagcattcaacggcactttcattgccgctggagggtatgatcgggaggaaggcaacaaagtggtggccgacggctatgctgatctcgttgcttatgggaggatctttctagctaatccagatttgccaagagattcgagctcgactcaccattgaacaagtacgaccgtaacactttctacacgcaagatcctgtcattggctacacagattatcctttccttgaaggcggctcgaatgccgagtagttcacccactcgacttgaattagtgatgtgcttgattttataaagtatgtaatgatttattcaatgtgtgtatgcacggggcatgtgcactgtatcattttcaccaataatttacttttgttttcccatgtaatgccatatgtcagatattatt

SEQ ID NO: 4691 - DNA, 661 bp, Triticum aestivum
ctttgttaaccaaccgcactgctgccgtccccgtctgcctccggccatcaaccatggcgaggagttccatggccgcggtgctcgccgtcctggccgtggcggcgctccggtgcgcgccggccgccgcggagtcccgctggtggagcacccggccaagaacgacgggtcgctcagcctgctcgtcatcggggactggggccgcaagggcacctacaaccaatccaggtcgcggagcagatggggaaggtcggggagaagctggacatcgacttcgtggtctccacctggcgacaacttctacgagaacggcctgacgggcgtccatgaccagcagtttgaagaatccttcaccaatatctacaccgccaagagcttgcagaagccgtggtacctcgttcttggaaaccatgactaccggggcgatgcggtagcacagcttgacccggtcctgcgcaagctcgatgagcgattcgtttgcatgagatcatttgttgtcaatgcagagatggtggagttcttcttcatcgacaccactccattccaactcaagtacgggactcaccgtgattctgtaacgggcaacaaccccttcaagccatggccatcaatccgcagctcgcacccaagatctcaagttagttgtcaggcatctttagcggtt

SEQ ID NO: 4692 - DNA, 777 bp, Triticum aestivum
ggagaggaaagagaggggacttggtccagaacaccaccccaacgacccccctcctctcccgtgttttctcctacttctcctcccggacggaggcttctcctctctcgccctgcttgattggagctgcccctcactccctctgtctccctgcgcgcacacgggattccaccattggcagaaagatcaaggtggcggcagtggcggcggcgagtagaggttccaccattggctagttcgtctcaaggagtagaattcttacatggtccctgtaaacaggaggggaacacagcctagggctgggatggagtactttgatgctaggcgtaaaccacataatattgggaaagtcgttgtggccctgctcttcgtagcactctgtatatttgttctgaagcaatctcctggttttggtggcaatagtgtgttttctcgtcatgaacctggggttacccatgtcttagtgacaggagtagctggctatattggttcacatgcctcattacagctattaaaagacaactatcgagttaccattgtggacaatctttctagaggaaataaaggagcagtaaaggttctccaagaattatttccggagcctgcgagacttcaattcatctatgcagatcttgcggatcaaaaatttgtcacaagatatttcttggaaatggtttgatggtctaaatcggagggacgcctaaagatcaagtacgtaggtgatggaagctagctttataggtcctaatcatatggggggtaaagtggtggaacggttca

SEQ ID NO: 4693 - DNA, 717 bp, Triticum aestivum
tacgagagcatgaagaatatctggacatgctttgatgcagcactaggagtcatttcaggattgaaggttaaagggatagattatccctacagctgatggaacctgcataagagactacattgatgtcacagatctagtagatgctcatgtgaaagcactcaacaaggcagagcctagtagagttggcatttataatgttggcactggaagaggccgttccgttaaggagtttgtcgatgcctgcaagcaggcaactggggttgacatcaaaattgagtacctcagcaggaggccaggagactatgctgaagtattcagtgaccccaccaagatcaacagtgagctcaactggactgctcaacacaccgatctgaaggaaagcctgtctgtcgcatggaggtggcaaagtcgcatccgcgtggctatggggcaaattagatatagctcgcaatcaataactccgctgaaaccgttaatacatgttgattctgtagttagtggtataggatcttggtgctctatactccttgccaagtcgcttcgttcttaatctgttcttttcttttttctgttttcaaaaggtttgttttttcctagtggaaatataagcgatccggatatgctggaaatcctgtaagcattcctgtaagagcaaattgcttgattgaaagaactgtgaagtacatttcttgtgccattcaaatctgatggttgtta

SEQ ID NO: 4694 - DNA, 702 bp, Triticum aestivum
ggcgcgaaatttgtactatgaagttaataaagcatcctaatgttgttcgactgcacgaggtgatgggaagtaaagcaagaattttcattgttctggaatacattactggaggggaactctttgataccatttataccaatggaaggctgaaagaagaggaagcacgcaaatactttcaacagctgataaacgccgttgactattgccacagtaggggtgtgtatcacagagatttgaagttagaaaatttgttgcttgatgctgctggaaacctcaaagtgtccgacttcggtttaagtgctttaactgagcaagtgaaggctgacgggttgctgcacacaacatgcggaactccgaactatgttgctcctgaggtgattgaggatagaggttatgatggtgcagctgcagatatctggtcttgcggggtaatcctttttattctccttgccgggtttttacctttcgaggatgaaaacatcatcgccctttataaaaagatctcagaagctcaattcacatgcccctcttggttttctactggagctaagaagttgattaccagaattttggaccctaatcctgcaactcgtatcaccattctcagatactggaggaccttggtccacaaggttcaagccactgttttgcgacagtttaactagttgaaaatttagccgcttggaccccagaccatttgaa

SEQ ID NO: 4695 - DNA, 853 bp, Triticum aestivum
agtcagtttccaagaacactgaactatgggcctgttgctatcaaatcctcgataaggagaagttcagaagctcagattggttgaacagattaggcgcgaaattttgtactatgaagttaataaagcatcctaatgttgttcgactgcacgaggtgatgggaagtaaagccagaatttttattgttctggaatacattactggaggggaactctttgataccatttataccaatggaaggttgaaagaagaggaagcacgcaaatactttcaacagctgataaacgctgttgactattgccacagtaggggtgtgtatcacagagatttgaagttagaaaatttgttgcttgatgctgctggaaatctcaaagtgtccgactttggtttaagtgctttaactgagcaagtgaaggctgatgggttgctgcacacaacatgcggaactccgaactatgttgctcctgaggtgattgaggatagaggttatgatggtgcagctgcagatatctggtcttgcggggtaatcctttttattctgcttgccgggtttttacctttcgaggatgaaaacatcatcgccctttataagaagatctcagaagctcaattcaaatgtccctcttggttttctactggagctaagaagctgatcaccagaattctggaccctaatcctgcaactcgtatcaccattcctcagatactggaggatccttggttcaaaaagggattcaagccacctgtttttgacgataagtatgaaactagctttgatgatgtctatgctgcatttggagactcagagaccagcatgtgaaagagcgactggcataagccacctcatgatactct

SEQ ID NO: 4696 - DNA, 913 bp, Triticum aestivum
atcgtgatttgaatcaccaaatcttttagtggacaaaaattgggttgttaaggtgtcagattttgggatgtcaaggttgaagcatcatacttttctttcctccaagtcgacagctggaacaccggagtggatggcaccagaggtcctgcgtaatgagccagctaatgagatgtgtgatgtctacagttttggagtaatcctgtgggaattagcaacgttgcgtgtaccttggagtgggctgaatccaatgcaagtcgtcggagcagttgggttccagaacaaacgactagacattcccaaagaggtcgacccactggttgctagcataatatcttcatgttgggacaacgacccaagcaaacgaccatcgttctcccagctcttgtcaccgctaaagaaattacagcggctacttgttacagaaagcctctgacaatttgtgagacaaatatctggataaacgcaaaaaaaagaagaaaaatatgagtatttatgctactacatggaccaagtttttcatgttgaagcccgtggagatatattcaagatctctgctgtatggatgcgtatggacaaaggttctgcacatccttttgtgaaaattgtctgcagcagcgcgaaggtggtgctgaagaaagcgtagcgtgttagttccaagtgaagaaaatgtggcgcaacacgaagtgctctgtgccatggtaaataattgttcagttctgtatttggagcggggtgggggtggttctgagaatcagaattcactacaaagataggatcttgatttttgttggtttaaacagaaaatgttgaggaaaaaaagggaaccaaaagttttttatgtccgcaaaaagtgcaggcttatatttagcacatgcaaccttgatgtcatgatgcagatttactacgtctcaag

SEQ ID NO: 4697 - DNA, 881 bp, Triticum aestivum
ccaaatctcttcccccagcgcgacaagcaatcaccaccgcagcgagcgaatcggccgctttgcacgcagcgaggaacccaccagatcttcccccaatttcgcgtcgacaagtagcagcggagacggccatggcgtcggacgtgcagatgggcggcggcgcggcggaggcggagaccttcgcgttccaggcggagatcaaccagctgctctcgctcatcatcaacaccttctactccaacaaggagatcttcctccgcgagctcatctccaactcgtcagacgcgcttgacaagatccggttcgagagcctgacggacaagagcaagctcgacgcgcagccggagctcttcatccgcctcgtccccgacaagcccagcaagacgctctccatcatagacagcggcgtcggcatgaccaagtcagacctggtgaacaacctgggcaccatcgcgcgctccggcaccaaggagttcatggaggcgctgcaggcgggcgcggacgtgagcatgatcggccagttcggggtgggattctactcggcctacctcgtggccgagaaggtggtggtcaccaccaagcacaacgacgacgagcagtacgtgtgggagtcgcaggccggcggctccttcaccgtcacgctcgacacggagggcgagcggctcggccggggcaccaagatcacgctcttcctcaaggacgaccagctcgagtacctggaggagcgccgcctcaaggacctcgtcaagaagcactcggagttcatcagctaccccatctacctatggaccgagaagaccaccgagaaggagatcagcgacgacgaagatgaagtatcggatgagaagaaggagggtgaggtcgaggaggtcaacgacgactcc

SEQ ID NO: 4698 - DNA, 261 bp, Triticum aestivum
cgaatctgatccgaatagctggctcaagtataccgtggctcctgcgatgcagcctacggagttggttgatccctacctgcagtctccgacagcaactccgtcagtgaagtcggagtgtgtgtcgccaaggaacagcggtctcttggaagagctgcttcatgaagctcagggactaagatctgggaagaatcagcagctttccgtgaggagttcaagttcctctgtcagtacgccgtgtgatactacggtggttagccagag

SEQ ID NO: 4699 - DNA, 662 bp, Triticum aestivum
catcacggtgatgtccaagagcatttgttggagttcgcgtgggggttggccaacaaccgtacgccttcctgtggaaacgtgcggccagacctcgtcaagggcgacgacgaggccgcactaccgccagagtttttcgcggcgaccgagggtcggagcatgctctcgacgtggtgcccgcaggagaaggtgctggagcacgaggccgtagggatcttcctcacgcactctgggtggaactcgtcgctggagggcatatgcggcggcattccgatggtgtgttggcccttctttgctgagcagcagaccaactgccgctacaagtgcacggagtggggcatcgggatggagattggggaagacgtgagaaggaccgaggtggaggccatgatacgggaggccatggagggggcgaaggggcgagagatgcgacggcgtgtgcaagagctccgggatagcgccctggcctccgcacggtgtgacggaaggtccatgcgcaatgttgataggctcatccatgaggtgcttctcgcttgaaacaagaaaattaagctgataaataaaaggccttggactgtctgaagcgtttattaggatgaaatcaatcccttctccatttcaaagtttcagtcactattttgagcggttagttgaatatgttacca

SEQ ID NO: 4700 - DNA, 688 bp, Triticum aestivum
acgcgggtcacccacgccgtgctcccgggcatggtcgacaggaagcgtggcgcaatcgtcaacatcggctccggtgctgcctccgtcgtgccgtccgatccactctactccgtctaccccgccaccaaagcgtacgtcgaccagttctcaagatgcctctatgttgagtacaagggcaagggcatcgatgtgcaatgccaggtgcccttgtacgtggcgacaaagatggcatcaatcaggagatcctccttccttgtgccatccgcggacacctatgctcgtgctgctattcgccacattggctatgagccgaggtgcacaccgtactggccacactctgttttgtggttcttgatttccctcctcccagagtcgctcgtggacagtacgcgcctcagcatgtgcatcaaaatccgcaagaaggggcaggctaaggatgccaagaagaaagcgcagtgatggttccgatgcttgttgattgttgagatctgccaatgtttcttcatcatgtgtaatggactagtacttgtagctttgttgtcggcatttcagtatcattacctcccatcacactaggttgggactgttgttgttccttccacggttacgaagcacaagcctgtaataccttatctccaaatgaatgtaacgccagctgcactcaaggtgaaattgaaactaactaatt

SEQ ID NO: 4701 - DNA, 828 bp, Triticum aestivum
actccatccgggcttcgacgtcggcgtgctcgtcaactacgccggggtctcgtacccgtacgcccgcttacttccatgaggtggacgaggagcctcatgcggagcctcatccgggtcaacgtcgaggggttaacgcgggtcacccacgccgtgctcccgggcatggtcgacaggaagcgtggcgcaatcgtcaacatcggctccggtgctgcctctgttgtgccgtccgatccactctactccgtctacgccgccacgaaagcgtacgttgaccagttctcaagatgcctctatgttgagtacaagggcaagggcattgatgtgcaatgccaggtgcccttgtacgtggcgacaaagatggcatcaatcaggaggtcttccttccttgtgccatccgcggacacctatgctcgtgctgctattcgccacattggctatgagccgaggtgcacaccgtactggccacactctgttctgtggttcttgatctcccttctcccagagtcacttgtggatagtacacgcctcagcatgtgcatcaagatccgcaagaaggggcaggctaaggatgccaagaagaaagcgcagtgatgattccgctgctagttcattgttgagatctgccatgtttcttcattatgtgtaatggactagtacttgtagctctgttgtcggcatttcagtatcattaccttcccatcacactaggttgagactgttgttgttcgttccacggttacgaaagcacaagcctgtaatactttatctccaaatgaatgtaacgccagctgcactaaaggtgaaaatgaaactaactaaattttttgc

SEQ ID NO: 4702 - DNA, 546 bp, Triticum aestivum
caggaagcgtggtgcaatcgtcaacatcggctccggtgctgcctctgttgtgccgtccgatccactctactccgtctacgccgccaccaaagcgtacgttgaccagttctcaagatgcctctatgttgaatacaagggcaagggcatcgatgtgcaatgccaggtgcccttgtacgtggcgacgaagatggcatcaatcaggaggtcttccttccttgtgccatccgcggacacctatgctcgtgctgctattcgccacattggctatgaaccaaggtgcacaccgtactggccacactctgttctgtggttcttgatctcccttctcccagagtcacttgtggatagtacacgcctcagcatgtgcatcaagatccgcaagaaggggcaggctaaggatgccaaaaagaaatcgcagtgatgattccgctgctagttcattgttgagatctaccatgtttcttcatcatgtgtaatggactagtacttgtagctctgttgtcggcatttcagtatcattacgttcccatcacactaggttgagac

SEQ ID NO: 4703 - DNA, 758 bp, Triticum aestivum
catacgtaacggcgttaaatgaagatcctgagcaatacagggctgagcacaaaggatggaagagtgggcacgctcacaaaatggtaacttgtttagttgaattttcttccagagatggggaaatagagtccattctgaaagatatatcagaaagggcccagggtaagggaaacttcagctacagccggttctttgctgttggcttgttccgtttgcttgagctctcaaatgcgacggagccaaccgtactggacaagctttgtgctgctctaaacatcaataaaaagagcgtggatagagaccttgacgtttaccgcaacttactctcgaaactggttcaagccaaggaacttctcaaggaatacatcgagagggaaaagaagaagagagaggagagattggagacgcccaagccgaatgaggctgttgcaaaattcgatggaagcgcttatcccttgaagcattaactcaacctttccccagaggacagcttgtccggataacagatattaacagttatacacatctggatagcgttgagaactattgggggcatctttggctgctcttcgcccgagtgtagtactcggccgtacaaaaagatccagattattcgtagtattgagtttggtattttgtaatttctccttctatgtgttcgaatgttatcgttttcttcacttctttgacaatatatgaagaggtatctggtgatgaatgttacaagatgagaaaaaatatatattttggctgaaaaa

SEQ ID NO: 4704 - DNA, 718 bp, Triticum aestivum
aagtcatacgtaacggcgttaaatgaagatccctgagcaatacagggctgatgcacaaaggatggaagagtggcacgctcacaaaatggtaacttgttagttgaattttcttccagagatggggaaatagagtccattctgaaagatatatcagaaagggcccagggtaagggaaacttcagctacagccggttctttgctgttggcttgttccgtttgcttgagctctcaaatgcgacggagccaaccgtactggacaagctttgtgctgctctaaacatcaataaaaagagcgtggatagagaccttgacgtttaccgcaacttactctcgaaattggttcaagccaaggaacttctcaaggaatacatcgagagggaaaagaagaagagagaggagagattggagacgcccaagccgaatgaggctgttgcaaaattcgatggaagcgcttatcccttgaagcattaactcaacctttccccagaggacagcttgtccggataacagatattaacagttatacgcatctggatagcgttgagaactatcgggggcatctttggctgctcttcgcgcgagtgtagtacattattcgtagtattgagtttggtattttgtaatttctccttctctgtgtttgaatgtatcgttttcttcacttctttgacaatatatgaagaggtatctggtgatgaatgttacaagatgaggaaaa

SEQ ID NO: 4705 - DNA, 706 bp, Triticum aestivum
caggctgatgcacaaaggaatggaagagtgggcacgctcacaaaatggtaacttgttagttgaattttcttccagagatggggaaatagagtccattctgaaagatatatcagaaagggcccagggtaagggaaacttcagctacagccggttctttgctgttggcttgttccgtttgcttgagctctcaaatgcgacggagccaaccgtactggacaagctttgtgctgctctaaacatcaataaaaagagcgtggatagagaccttgacgtttaccgcaacttactctcgaaattggttcaagccaaggaacttctcaaggaatacatcgagagggaaaagaagaagagagaggagagattggagacgcccaagccgaatgaggctgttgcaaaattcgatggaagcgcttatcccttgaagcattaactcaacctttccccagaggacagcttgtccggataacagatattaacagttatacacatctggatagcgttgagaactatcgggggcatctttggctgctcttcgcgcgagtgtagtactccgccgtacaaaaagatccagattattcgtagtattgagtttggtattttgtaatttctccttgtctgtgttcgaatggatcgttttcttcacttatttgacaatatatgaaagaggtatctggtgatgaatgttactcacaagatgagaaaatta

SEQ ID NO: 4706 - DNA, 739 bp, Triticum aestivum
tcttaaagggagagttggcccccaaaaccatccatgtaccatcaggggagaagcttctgtttttgatgctgctatgaaatacaagaacgaagggcatgacactatcatcctggctggtgctgagtatggcagtggaagctcaagggattgggctgcgaagggtccaatgcttcagggagtgaaggctgtgatagccaagagttttgagaggattcaccgtagcaatctcgctggaatgggcatcgtccctctatgcttcaaggctggggaggatgccgacactcttggcttaacaggccatgagcgctacaccatccagcttccgactgatgtgaatgaaatcaagcctggccaagatgttacggtcacaaccgacaacggcaagtcgttcacgtgcacactccgctttgacactgaggtggagcttgcttactacacccatggtggtattctaccatatgtcatcagaaagatcgcagccgagcaatagagagatgattgcgacgacgaggcaaattgtaattgttgtaaacagtttgtttagcaagtcctgtttgaggagtaccccctcaaataacgtctgagatgtcggcagagaactcggaaattttgagcgcgtaacacgctaggtttttgtttgaaggcactactatgttaataatatgcctcacaactgatgagatgcttttgcatattgtaacggtctatgaacactgaagtggatcagccgaaggaatgt

SEQ ID NO: 4707 - DNA, 780 bp, Triticum aestivum
gttcttgaagggagagttggccccaaaccgtccatgttccatcaggggagaagcttgctgtttttgatgctgctatgaaatacaagaatgaagggcatgacactatcatcctggctggtgctgagtatggcagtggaagctcaagggattgggctgcaaagggtccaatgcttcagggagtgaaggccgtgatagccaagagttttgagaggattcaccgtagcaatcttgctggaatgggcatcgtccctctatgcttcaaggctggggaggatgccgacagtcttggcttaactggccatgagcgttacaccatccagcttccgactgatgtgaatgaaatcaagcctggccaagatgttacagtcacaaccgacaacggcaagtcgttcacgtgcacactccgctttgacaccgaggtggagcttgcttactacacccatggtggtattctaccatatgtcatcagaaagattgcagccgagcaatagagagatgattgtgacgacgaggcaacttgtaattgttgtaaacagtttgtttagcaagtcgtgtttgaggagtaccccctcaaataacatctgagatgtctgcagagaactcggaaattttgagcgcgtaacacgctaggttttcgtttgaaggcactatgttaataatatgcctcacaactgatgagatgcttttgcatattgtaacggtctatgaacaatgaggtggaatcagccgaaggaatgtccacattgttttctctttcctgggttattttctggtaacccc

SEQ ID NO: 4708 - DNA, 872 bp, Triticum aestivum
  N_region (771)..(771): n = any nucleotide
  N_region (779)..(779): n = any nucleotide
  N_region (803)..(803): n = any nucleotide
  N_region (848)..(848): n = any nucleotide
catcaggggagaagcttgctgtttttgatgctgctatgaaatacaagaacgaagggcatgacactatcatcctggctggtgctgagtatggcagtggaagctcaagggattgggctgcgaagggtccaatgcttcagggagtgaaggctgtgatagccaagagttttgagaggattcaccgtagcaatctcgctggaatgggcatcgtccctctatgcttcaaggctggggaggatgccgacactcttggcttaacaggccatgagcgctacaccatccagcttccgactgatgtgaatgaaatcaagcctggccaagatgttacggtcacaaccgacaacggcaagtcgttcacctgcacactccgctttgacactgaggtggagcttgcttactacacccatggtggtattctaccatatgtcatccgaaagatcgcagccgagcaatagagagatgattgcgacgacgaggcaaattgtaattgttgtaaacagtttgtttagcaagtcctgtttgaggagtaccccctcaaataacatctgagatgtctgcagagaactcggaaattttgagcgcgtaacacgctaggtttttgtttgaaggcactatgttaataatatgcctcacaactgatgagatgcttttgcatattgtaacggtctatgaacactgaggtggaatcagccgaaggaatgtccacattgttttctctgttcgtgggttatctttctggtccttttttttgggtagcttcttttggtaaccccngaatgatntgtctattgttttaattgtgcacnccgagttttgtcatctgatcatctgcttttggatgactagattcngcaaaacctggtgatggtagtaag

SEQ ID NO: 4709 - DNA, 1290 bp, Oryza sativa
atggcgggcgcggtgtcggcgctgttccttctggacatcaagggccgcgtcctcgtctggcgcgactaccgcggcgacgtctccgccctccaggctgagcgcttcttcaccaagctcctcgacaaggagggcgactcggaggcgcactcgccggtggtctacgacgatgccggggtcacctacatgttcatccagcacaacaacgtgttcctactaaccgcctcccgccagaactgcaacgccgccagcatcctcctcttcctccaccgcgtcgttgatgtgttcaagcactatttcgaagagttggaggaagagtcgctgagggataactttgtcgttgtgtatgagttgcttgatgaaatgatggattttgggtacccacaatacacggaggcgaaaatcttaagtgaattcattaagacggatgcgtacaggatggaggtatcacagaggccacctatggcagtgacaaatgccgtgtcatggcggagtgagggtattcggtacaagaagaatgaagtgttcttggatgttgtggagagtgttaacattcttgttaacagcaatgggcagattgtgagatcagatgttgttggggcactgaagatgcggacatatttgagtggaatgcctgagtgcaaacttggattgaacgatagggttcttttggaggctcaaggccgagctactaaaggaaaagcaatagatcttgatgatattaaatttcaccagtgcgtgaggttggctagatttgagaatgatagaactatatccttcatacctcctgacggatctttcgatctaatgacatacagacttagcacccaggtaaaaccacttatctgggtggaagcacaaattgagaaacattcaagaagccgaatagaacttatggtgaaagcaagaagtcagtttaaggaaaggagcacagcaacaaatgttgaaattgaagtgcctgttccttcagatgctacgaaccctaatataagaacttcaatgggctctgctgcatatgcacctgagagagatgcaatggtctggaaagtaaaatcatttcctggtggcaaggattacatgtgcagagctgaatttagtcttccaagtataactgcagaagaagcagctcctgaaaagaaggcaccaatacgagtgaaatttgagataccatatttcactgtgtcgggtattcaggttcgctatctgaagatcattgaaaagagtgggtaccaggcgcttccttgggttagatacattacaatggctggtgaatacgaactgagacttatatga

SEQ ID NO: 4710 - DNA, 567 bp, Oryza sativa; identical to SEQ ID NO: 391

SEQ ID NO: 4711 - DNA, 870 bp, Oryza sativa
atggccgcgcgcgtgctccccctcctcctcgtcgtcgtcgtcgccgcggccatggcgagagcccccacggcccacgcgtggggcaaggagggccactacatggtgtgcaagatcgccgagggtttcctgacgaaggaggcggcgacggcggtgaaggagctcctccccgggtgggccggcggcgagctcgcggaaacgtgctcgtgggcggacaccgagcggttccggtaccggtggtcgagccccctccacttcgccgacacccccggcgactgccagttcaactacgcccgggattgccacaacacaaacggtgagaaggacatgtgtgtggtcggagcgatcaacaactacaccaacgcgctcgaggactcatcaagtccatatgatccaaccgagagcttgatgttcttggcacacttcgtcggcgacgttcaccagcctctccactgcggccacgtcaaagatcttggtggcaacaccatcatcgtccattggtacacaaggaagagcaaccttcatcacgtgtgggatgtgaacgtcattgaaacggccttgaaggaattctacaacgaggacgtgagcacgatgataaaggccatcaagatgaacatcactgatgagtggtccaccgaggagaagcagtgggagacttgccgtagccggacaaagacttgtgccgataagtacgccgaggagagtgcaaagctcgcgtgcaaagcgtacgagggtgttgagcaagaatccaccttagaagatgactatttcttcgctgccctgcctgttgttcagaagaggattgctcaaggtggcgtgaggcttgctgcaatactcaaccggatcttcagcgggaacaaggttcagagtagt

SEQ ID NO: 4712 - DNA, 1308 bp, Oryza sativa
atgccgccgttcgactacacgccgccgccgtacgacgggccgcgggcggaggagatctcccggaagcgggccgagttcctcagcccctccctcttccacttctacgaccgccctttgaacatagtcgatgggaaaatgcagtacctgttcgacgaggatggccgccgttacctggatgcttttggtggcattgcaaccgtttgttgcgggcactgccatccggatgttgttgaggcgatggtcaaccaagcaaagaggatacaacactccacagttctttacctgaatcatgctattgcagattttgccgaggcattggcagccaaaatgcctggtgatctgaaggttgttttcttcacaaattctggcacggaggcgaacgagcttgcactgatgattgcccggctttacactggttgccatgacattatttcactcaggaatggataccacgggaatgcggctggaacaatgggtgctaccgctcaatgcaactggaaatttaatgttgttcagacgggagtgcaccatgcacttaatccagacccatatagaggtgctttcggttctgatggcgaaaagtatgcccgagatgttcaggaaatcattgattttggaactacaggaagggtcggtggtttcatttcggaagccatacagggagtgggtggaatagtggaactggcaccaggatacttgcctgctgtgtacaatatggtaaggaaagctggcggcctctgcatcgccgacgaagttcaggcgggagtcgcacgaactggaagccacttctggggatttgaatcgcacggcgtcatcccagacatagttacaatggcaaagggtataggcaatggcataccgatcggagcagtcgtcacaacccctgagatcgctcaggtgttaacccgcaggagctacttcaacaccttcggtggcaaccctgtcagcacagccggtggccatgctgttctcaaggttctggagaaggagaagctccaggagaacgcatttgtggttggctcctacctgaaggaacggctcaacaagctgaaagagaagcatgacatcattggtgatgttagagggaaaggcttccttcttggggttgagctggtgaccgatcgccagaagaagacaccggccaaagttgagatcggtcatgtcatgaaccacatgaaagacatgggtgtgctggttgggaaaggtggtttctacgggaacgtgttcagagtaacacctccactatgcttcaccaaagaggactccgatttcttcattgaggcgatggacatttcactatcgaagctg

SEQ ID NO: 4713 - DNA, 750 bp, Oryza sativa
atgccgatccgcaacatcgccgtggggagccaccaggaggtgtaccacccgggtgcactcaaggcggcgttggccgagttcatctccaccctcatcttcgtcttcgccggccagggctccggcatggccttcagcaagctgaccggcggcggagcgacgacccccgccgggctgatcgcggcggcggtggcccacgccttcgccctgttcgtggcggtgtccgtcggcgccaacatctccggcggccacgtgaacccggccgtgaccttcggcgccttcgtcggcggcaacatcaccctgttccgcggcctcctctactggatcgcccagctcctgggctccaccgtggcgtgcttcctcctccgcttctccaccggcgggctcgccaccggcaccttcggcctgaccggcgtctccgtgtgggaggccctggtgctggagatcgtaatgaccttcggcctcgtttaccccgtgtacgccccccccgttgaccccaaaaagggcagccttggcaccattgcccccatcgccatggggtttattgtgggggggaacatccttgttggcggggggtttgacggggcctccatgaaaccggccgtttcctttgggccggcccttgtcagatggtcctgggagtcccagtgggtgtactgggttggccccctcatcggcgggggcctccccggggtcatttacaaggtccttttttttttccccacccccgagcaggtccccccccccgactat

SEQ ID NO: 4714 - DNA, 423 bp, Oryza sativa
atgggtcgcgtgcggaccaagacggtgaagaagacctcgaggcaggtgatcgagaagtactactcgcggatgacgctcgacttccacaccaacaagaaggtgctcgaggaggtgtccatcctgccgtcgaagcggctgcgcaacaaggtggccgggttcaccacccacctgatgcgccgcatccagcgcgggcccgtgcggggcatctcgctgaagctgcaggaggaggagcgcgagcgccgcatggacttcgtcccggagaagtcggcgctcgaggtggaggagatccgcgtcgacaaggagaccatggagatgctcgccgcgctcggcatggccgacctccccggcgtcgagcgccagcaagaggtctccgcgccgacctactcccgcccgccgtacggtggcccccgccgcgaccgcgtc

SEQ ID NO: 4715 - DNA, 1947 bp, Oryza sativa
atggcgggcaagggcgagggtccggccatcggcatcgaccttggcacgacctactcgtgcgtgggcgtttggcagcacgaccgcgtggagatcatcgccaacgaccagggcaaccgcaccaccccctcctacgtcggcttcaccgactccgagaggctcatcggagatgctgccaagaaccaggtcgccatgaaccccatcaacaccgtctttgatgccaagcgtctcattggcaggaggtttagcgatgcttctgttcagagtgacattaagctctggcccttcaaggtgattgctggacctggtgacaagcctatgattgttgtccagtacaagggtgaggagaagcagtttgctgcagaagagatctcctccatggtcctcatcaagatgcgtgagattgctgaggcctaccttggcaccaccatcaagaatgccgttgtcactgttcctgcctacttcaatgactcccagaggcaggccaccaaggatgctggagtgattgctggtctcaatgtcatgcgtatcatcaacgagccgactgctgcagctattgcctatggtcttgataagaaggccaccagcgttggtgagaagaatgtcctcatctttgaccttggaggtggtacctttgatgtctccctccttaccattgaggagggtatctttgaggtcaaggccacagctggtgacacccatcttggtggtgaagattttgacaatcgtatggtcaaccactttgtgcaagaattcaagaggaagaacaagaaggatatcactggcaaccccagggctctcaggaggttgaggacagcttgtgagagggcaaagaggaccctgtcctccactgcccagaccaccattgagatcgattccctgtatgagggcatcgacttctactcaaccatcacccgtgccaggtttgaggagctcaacatggatctcttcaggaagtgtatggagcctgtggagaagtgcctcagggatgctaagatggacaagagctctgttcatgatgttgtccttgttggtggctccactaggatcccgagggtgcagcagctcctgcaggatttcttcaacggcaaggagctttgcaagaacatcaacccagatgaggctgttgcttatggtgctgctgtccaggctgccatcttgagtggtgagggcaacgagaaggtccaggacctcctcctgttggatgttacccctctctctctcggtttggagactgctggtggtgtcatgaccgttttgatcccaaggaacaccaccattcccaccaagaaggagcaggtcttctccacctactccgacaaccagcctggtgtgctcatccaggtttatgagggtgagaggaccaggacacgtgacaacaacctgctggggaagtttgagctctctggaatccctcctgctcccaggggtgttccacagatcactgtttgcttcgacattgatgccaatggtatcctgaacgtgtctgctgaggacaagaccaccgggcagaagaacaagatcaccattaccaacgacaagggcaggcttagcaaggaggagattgagaagatggtccaggaggccgagaagtacaagtcagaggatgaggagcacaagaagaaggtggagtccaagaacgcgctggagaactacgcctacaacatgcgcaacaccatcaaggatgagaagatcgcctcgaagctcccggcagcggacaagaagaagatcgaggatgccatcgaccaggccatccagtggctggacggcaaccagctcgctgaggctgatgagttcgatgacaagatgaaggagctggagggcatctgcaaccccatcatcgccaagatgtaccagggcgctggcgcggacatggccggcggcatggacgaggacgatgctcccccggctggcggcagcggtgctggccccaagatcgaggaggtcgac

SEQ ID NO: 4716 - DNA, 1719 bp, Oryza sativa
atggatctcctccagtcgtcctacacgccggacgacgaggacgacgacgagcagcagcccctctcctcgccggacgcctcgccgctccgcctccccgccaagtcggccgcccccgccgtcgacgacacggcgctcgcgctctccgccgccgccgcgtccacctcccgcccgctcgacccctccctccacctcgtcccctttaaccccaccgccgaccagctctgggcgcccgtcctcgggccccagcacccccacgcccccatctcctccgcctccggcaaccgcaaccacaagctcggccacgtcgaggacgccgccgtcctccccttcctcttcgacgagcagtacaacaccttccaccgcttcggctacgccgccgacccctccggcctccacatcgtcggcgacgcccagccctcggccgagcccgacaccgtctacaacctcgccccctccgagcacaagcgccgccgcctgcagtccaaggacgaggagggcgccaaccaggagcccctaccgccggaggccaagaacccggcgtccgacgagtggatcctccgcaacaagcagagcccctgggccggcaagaaggaggcaccacccgcggagctcactgaagagcagcgtcagtatgcggaggcgcacgctgccaagaaggccgagaaggaggcgcgcggcgaagggaagggcgagaagtctgatatggttgccaagagtactttccatgggaaggaggagagggattaccaaggacggtcatggatcacaccgcccaaggatgccaaggcgagcaacgagcgctgctatattcccaagaggtgtgtgcacgagtgggttgggcacaccaagggggtctcggcgattaggtttttccccaagtatggacaccttttgctgtctgcgagtatggattgtaagattaagatctgggatgtgctcgagtcgaggacatgtatgcggacgtacatggggcactctaaggcggtcagagatatatcgttttctaatgatgggactaagttcttgagtgctgggtatgacaggaatatacagtattgggatactgagaccgggcaggtgatctcgaccttctctactggcaaggtcccttatgtagtgaagctcaacccggatgaggataagcagcatgttctcctcgctgggatgagtgacaagaagattgtgcagtgggatatgaagtcagggcagataacccaagagtacgaccagcacttgggagcagtcaataccatcacttttgtagataataataggaggtttgtgacatcaagcgatgacaagtcgcttcgtgtgtgggagttcggcatcccagtggtgattaagtatatcagtgaaccacacatgcattcaatgccatcaatatcactgcacccgaattccaactggctggcagcacagagcttggacaatcagatattgatatacagtaccaaggagaggtttcaacttaacaagaagaagcggtttgcgggtcacattgtggcaggttacgcttgtcaagtgaacttctcaccagatgggaggttcgtgatgtcaggagatggtgaaggtagttgctggttctgggactggaaaagctgcaggagatttaagacgttgaagtgccacaatggagtttgcattggatgtgagtggcatcccttggagactagcaaggttgcaacatgtggatgggatggcgtaattaagtactgggat

SEQ ID NO: 4717 - DNA, 369 bp, Oryza sativa
atggcccggatcaaggtgcacgagctccgggggaagaacaaggcggagctgcaggcccagctcaaggacctcaaggcggagctctccctcctccgcgtcgccaaggtcaccggcggcgcccccaacaagctctccaagatcaaggtggtgcgcacctcgatcgcgcgcgtgctgacggtgatctcgcagaagcagaaggcggcgctgagggaggcgtacaagaagaagagcctgctcccgctcgacctccgccccaagaagacccgcgccatccgcaggcgcctcaccaagcaccagctctctttgaagaccgagagggagaagaagcgtgagaagtatttccccatgaggaagtatgctgttaaagct

SEQ ID NO: 4718 - DNA, 420 bp, Oryza sativa
atgtcgaagcgagggaggggagggtcggcggggaacaagttccggatgtcgctgggtctgcctgtggcggcgacggtgaactgcgcggacaacaccggggccaagaacctctacatcatctccgtgaagggcatcaagggccgcctcaaccgcctcccgtccgcctgcgtcggcgacatggtcatggccaccgtcaagaagggcaagcccgatctccgtaagaaggtcatgcccgccgtcatcgtccgccagcgcaagccgtggcgccgcaaggacggtgtctacatgtacttcgaagataatgctggagtgattgtgaatcctaagggtgagatgaaaggttctgctatcactggacccatcgggaaggagtgtgctgacctttggcctaggatagctagtgcagcaaatgctattgtc

SEQ ID NO: 4719 - DNA, 570 bp, Oryza sativa
atggccggggtggcggcgttgcagggcgcgatggcgtccctctccatctctgcgccgggggcggcgagcaccagcagcttctggggccacccgctctccaccttcgccgccgcgccggctggggttaaatttatgatcaagacatgcccaattcaaatgaggcttaagcgatgggagaggaagaagtgtaaaccaaacagtcttcctgtcctccacaagatgcatgttaggattggcgatacagtacaagtcattgcaggccgtgagaaaggtaaagttggagaagttacgcggctttttaagcacaacagcactgtaatagtgaaggacttgaacttgaagtccaagcacaagaaaggaacagaagatgaaccgggtgaaatcgtcatgattgaaggccccattcacagctcaaatgtgatgctctactcaaaggaaaagaatgtggcgagtagggttggacacaaattccttgaggatggaacgaaggttcggtacctggtcaagactggtgaaataattgacagtgctgagaattgggtcaaggtgttcaaggaaggaagttcggag

SEQ ID NO: 4720 - DNA, 720 bp, Oryza sativa
atggcgagcccgcagtgctgcgcgaacccaccgacgctgaacccggccggcggggaggggaaggtggtggagagcttcggcgggatcaaggcgtacgtcgccggcgccgcggagtccaaggccgccgtcgtcctcatctccgatgtcttcgggtttgaagcgccgaacctgaggaagatagccgacaaagttgcctcgtctggatactttgttgtggtgccagatttcttacatggggatcctttagtacctgaaagtactgagaaaccgtttcaaatgtggataaaagaacatggcccggacaaagcatttgaagaggcgaaaccaattattgccgctctgaaggagaaaggagtgtctagtattggggctgtaggttattgctggggtgcaaaggtggtggtagagttagtgaaagctcatgagatccaggctgctgtgatgtgtcacccctcttttgtgactgttgatgatatgaaagaggtcaaatgcccaattgctatacttggagctgaaattgatcgtatgtccccaccagaagtggtgaagcagttcgagcaggttctttcttcaaagtcagggattggccactttgtcaagatcttccctggggttgaacatggatggactgtgagatacaagaatgatgatgcagctgctgtcaagagcgccgaggaagccctggcggacatgattgactggtttaataagaacctgaag

SEQ ID NO: 4721 - DNA, 315 bp, Oryza sativa
atggtgaacgttcccaagaccaagaagacctactgcaagaacaaggagtgcaggaagcacacccttcacaaggtcactcagtacaagaagggtaaggacagcctgtctgcccagggaaagcgccgttatgaccgtaagcagtcaggatatggtggtcagaccaagcctgttttccacaagaaggcaaaaaccaccaagaagattgtgctgaagctgcaatgccaaagctgcaagcattactcccagcaccccatcaagaggtgcaagcatttcgagattggtggagacaagaagggcaagggaacatctcttttc

SEQ ID NO: 4722 - DNA, 420 bp, Oryza sativa; identical to SEQ ID NO: 4718

SEQ ID NO: 4723 - DNA, 459 bp, Oryza sativa
atggcgcccaaggcggagaagaagccggccgcgaagaagcccgcggaggaggagcccgcggcggagaaggccgagaaggccccggcggggaagaagcccaaggcggagaagcgtctccccgccggcaagggcgagaagggcagcggcgaggggaagaaggcggggcggaagaaggggaagaagagcgtcgagacctacaagatctacatcttcaaggtgctcaagcaggtccaccccgacatcggcatctcctccaaggccatgtccatcatgaactccttcatcaacgacatcttcgagaagctcgccgccgaggccgccaagctcgcccgctacaacaagaagcccaccatcacctcccgggagatccagaccgccgtccgcctcgtcctccccggcgagcttgccaagcacgccgtctccgagggcaccaaggccgtcaccaagttcacttcctct

SEQ ID NO: 4724 - DNA, 1947 bp, Oryza sativa
atggcgggcaagggcgagggtccggccatcggcatcgaccttggcacgacctactcgtgcgtgggcgtttggcagcacgaccgcgtggagatcatcgccaacgaccagggcaaccgcaccaccccctcctacgtcggcttcaccgactccgagaggctcatcggagatgctgccaagaaccaggtcgccatgaaccccatcaacaccgtctttgatgccaagcgtctcattggcaggaggtttagcgatgcttctgttcagagtgacattaagctctggcccttcaaggtgattgctggacctggtgacaagcctatgattgttgtccagtacaagggtgaggagaagcagtttgctgcagaagagatctcctccatggtcctcatcaagatgcgtgagattgctgaggcctaccttggcaccaccatcaagaatgccgttgtcactgttcctgcctacttcaatgactcccagaggcaggccaccaaggatgctggagtgattgctggtctcaatgtcatgcgtatcatcaacgagccgactgctgcagctattgcctatggtcttgataagaaggccaccagcgttggtgagaagaatgtcctcatctttgaccttggaggtggtacctttgatgtctccctccttaccattgaggagggtatctttgaggtcaaggccacagctggtgacacccatcttggtggtgaagattttgacaatcgtatggtcaaccactttgtgcaagaattcaagaggaagaacaagaaggatatcactggcaaccccagggctctcaggaggttgaggacagcttgtgagagggcaaagaggaccctgtcctccactgcccagaccaccattgagatcgattccctgtatgagggcatcgacttctactcaaccatcacccgtgccaggtttgaggagctcaacatggatctcttcaggaagtgtatggagcctgtggagaagtgcctcagggatgctaagatggacaagagctctgttcatgatgttgtccttgttggtggctccactaggatcccgagggtgcagcagctcctgcaggatttcttcaacggcaaggagctttgcaagaacatcaacccagatgaggctgttgcttatggtgctgctgtccaggctgccatcttgagtggtgagggcaacgagaaggtccaggacctcctcctgttggatgttacccctctctctctcggtttggagactgctggtggtgtcatgaccgttttgatcccaaggaacaccaccattcccaccaagaaggagcaggtcttctccacctactccgacaaccagcctggtgtgctcatccaggtttatgagggtgagaggaccaggacacgtgacaacaacctgctggggaagtttgagctctctggaatccctcctgctcccaggggtgttccacagatcactgtttgcttcgacattgatgccaatggtatcctgaacgtgtctgctgaggacaagaccaccgggcagaagaacaagatcaccattaccaacgacaagggcaggcttagcaaggaggagattgagaagatggtccaggaggccgagaagttcttttcagaggatgaggagcacaagaagaaggtggagtccaagaacgcgctggagaactacgcctacaacatgcgcaacaccatcaaggatgagaagatcgcctcgaagctcccggcagcggacaagaagaagatcgaggatgccatcgaccaggccatccagtggctggacggcaaccagctcgctgaggctgatgagttcgatgacaagatgaaggagctggagggcatctgcaaccccatcatcgccaagatgtaccagggcgctggcgcggacatggccggcggcatggacgaggacgatgctcccccggctggcggcagcggtgctggccccaagatcgaggaggtcgac

SEQ ID NO: 4725 - DNA, 318 bp, Oryza sativa
atggtgaacgttcccaagaccaagaagacctactgcaagaacaaggggagtgcaggaagcacactccttcacaaggtcactcagtacaagaagggtaaggacagcctgtctgcccagggaaagcgccgttatgaccgtaagcagtcaggatatggtggtcagaccaagcctgttttccacaagaaggcaaaaaccaccaagaagattgtgctgaagctgcaatgccaaagctgcaagcattactcccagcaccccatcaagaggtgcaagcatttcgagattggtggagacaagaagggcaagggaacatctcttttc

SEQ ID NO: 4726 - DNA, 315 bp, Oryza sativa; identical to SEQ ID NO: 4721

SEQ ID NO: 4727 - DNA, 399 bp, Oryza sativa
atggcgtccaaggcgttcgctctgttcctggccgtgaacctcgtcgtgctcggggtggcaagcgcctgcggcggcagcccgtcgtgcccgacgccgacgccgtcgaccccgacaccgtcaacgccgacgccgacgccgtcggcgttcgggaggtgcccccgcgacgcgctgaagctgggcgtgtgcgccaacgtgctgggcctgatcaaggccaaggtgggcgtgcctccggcggagccgtgctgcccgctgctggaggggctcgtcgacctcgaggcggcggtgtgcctctgcacggccatcaggggcaacatcctcggaatcaacctcaacctccccatcgacctcagcctcatcctcaactactgcggcaagaccgtccccaccggcttcaagtgc

SEQ ID NO: 4728 - DNA, 525 bp, Oryza sativa
atggcccccaccgtgatggcctcctcggccacctccgtggctccattccaagggctcaagtccaccgccgggctccccgtcagccgccgctccaccaactcgggcttcggcaacgtcagcaatggcggaaggatcaagtgcatgcaggtgtggccaattgagggcatcaagaagttcgagaccctatcgtacctgccaccactcaccgtggaggatcttttgaagcagatcgagtacctgcttcgatccaagtgggtgccttgcctcgagttcagcaaggttggattcgtctaccgtgagaaccacaggtctcccgggtactacgatggcaggtattggaccatgtggaagctgcccatgttcggctgcaccgatgccacccaggtgctcaaggagctcgaggaggccaagaaggcctaccccgatgcctttgtccgtatcatcggcttcgacaacgtcaggcaggtgcagttgattagcttcatcgcctacaagcccccaggttgcgaggagtctggtggcaac

SEQ ID NO: 4729 - DNA, 912 bp, Oryza sativa
atgggagggtttgtcaagacccagaagaccaatgcctaccacaagcgtttccaagtcaagttcaagagacggaggcagggcaagactgactacagggccaggattaggctcaccaaccaagataagaacaagtacaacacaccgaagtaccgcttcgttgtgagatttacaaacaaagatatcacagctcaaattgtctatgctaccattgctggtgatatcgtgatggctgctgcctactcccatgagctgcctcgctatggtcttgaagttggtctcaccaactatgcggcagcttattgcactggcttgcttttggctcgccgtgtgctcaagctccgtggtttggaccaggagtacgagggcaatattgaggccactggggaggactactatgttgaaccagctgatgaaaggcggcctttccgtgctctcttggatgttggcctcattaggacaaccactggaaaccgtgtctttggtgccctcaagggagctttggatggtggtcttgacattcctcacagtgacaagaggtttgctgggttcaagaaggacgagaagcagcttgattctgatattcaccgcaagtacatctacggtgggcacgtggctgactacatgaggtctatggcggaggaggaacctgagaaattccaagcccacttcagtgagtacctcaagaagggaattgatgctgatggcatggaagcactgtacaagaaggtccatgctgccatccgtgctgatcctaccatggccaaatcaaccaagaaggaaccggcgacccacaagagatacaacctcaagaagctaacctacgaacagaggaaggccagtcttgtcgaaagattgaatgctctcaactcctctgctggtgctgatgatgatgacgaggaagaggatgatgag

SEQ ID NO: 4730 - DNA, 309 bp, Oryza sativa
atgtcgggccgtggcaagggaggcaaggggctgggcaagggaggcgcgaagaggcacaggaaggtgctgcgcgacaacatccaggggatcacgaagcccgcgatccggaggctggcgaggaggggcggcgtgaagcgcatctccgggctgatctacgaggagacccgcggcgtgctcaagatcttcctcgagaacgtcatccgcgacgccgtcacctacaccgagcacgcccgccgcaagaccgtcaccgccatggacgtcgtctacgcgctcaagcgccagggccgcaccctctacggcttcggcggc

SEQ ID NO: 4731 - DNA, 672 bp, Oryza sativa
atgagcaaggagaagcaccacaagcgggagcaccacctccggcgatgctgcggcgggatggcggcgtgcatcctggcgctggtcctcgtcgtcggcttcatcgcgctcgtcgtctacctcgcgctccgcccctccaagccgtccttctacctgcaggacctccagctccgctccgtcgacctcggcgacccctccctctccgccaccgcgcaggtcaccctcgcctcccgcaaccccaatgaccacgtcggcgtccactaccgccgcctcgacgtcttcgtcacctaccgcgacgaacccgtcacggtgcccgtctccctcccgccgacctaccagggccaccgcgacgtcaccatctggtcgcccgtgctctccggcgagtccgtccccgtggcgggcttcgtcgccgacgcgctcaggcaggacgtcgccgccgggtacgtcgcgctgcaggtgaaggtcgacggccgcgtcaagtggaaggtcggcagctgggtctccggcagctaccacctctttgtcagctgccccgccatgctcgcctccgccggaccaggcggcgtcggccccatgcctctcggcggcgcctccgccgccgtcgtgaacggcaccggcgccggcgccgtcgcgtcgctcaggttcacgcagccgacagggtgcagcgtcgaggtg

SEQ ID NO: 4732 - DNA, 309 bp, Oryza sativa
atgtcggggcgcggcaagggcggcaaggggctcggcaagggcggcgcgaagaggcatcgcaaggtgctccgcgacaacatccagggcatcaccaagccggcgatccggaggctggcgaggaggggcggcgtgaagcgcatctccgggctgatctacgaggagacccgcggcgtgctcaagatcttcctcgagaacgtcatccgcgacgccgtcacctacacggagcacgcccgccgcaagaccgtcaccgccatggacgtcgtctacgcgctcaagcgccagggccgcaccctctacggcttcggcggc

SEQ ID NO: 4733 - DNA, 309 bp, Oryza sativa; identical to SEQ ID NO: 4732

SEQ ID NO: 4734 - DNA, 309 bp, Oryza sativa
atgtcggggcgcggcaagggaggcaaggggctgggcaagggcggcgcgaagcgccaccgcaaggtgctccgcgacaacatccaggggatcaccaagccggcgatccggaggctggcgaggaggggcggcgtcaagcgcatctccgggctcatctacgaggagacccgcggcgtgctcaagatcttcctcgagaacgtcatccgcgacgccgtcacctacaccgagcacgcccgccgcaagaccgtcaccgccatggacgtcgtctacgcgctcaagcgccagggccgcaccctctacggcttcggaggc

SEQ ID NO: 4735 - DNA, 699 bp, Oryza sativa
atgtcgacggaggcggagaccaccagcgccgccgcccccgcccccgcccccgcccccgcatcggcgccggcgcggtgccagcggataggctgcgacgccacgttcaccgacgacaacaaccccgacggctcctgccaataccacccctccggacctatgtttcatgatggcatgaaacagtggagttgctgtaagcaaaaaagccatgattttagcctatttttggctattcctgggtgcaaaactggaaagcacacaactgagaaaccaatcacaaaagcagttcctactaaaccatcaaaggcagttccagtccagacttcgaagcagagtgtgggagctgacacttgctcaaggtgccgtcaaggtttcttttgctctgaccatggatcacaacccaaggcacaaataccaaccgctaccagtgatactaacatggtacctgttgagaagcctgcagttccaccaccaaagaaaaaaattgatctgaatgagcctagggtttgtaagaacaaaggatgtggtaaaacctacaaggagaaggataatcatgatgaagcatgcgattaccatccaggacctgcagtttttcgcgacaggattagagggtggaaatgttgtgatattcatgtcaaggaatttgatgaatttatggagatccctccgtgcacaaagggttggcacaatgctgatgccgca

SEQ ID NO: 4736 - DNA, 1320 bp, Oryza sativa
atgggggagtgcaaggtgggaggaggaggcggaggcggagactgcttgatcaagctgttcgggaagaccatccccgtgccagagcccggcgcctgcgccgccggcgatgttgataaggaccttcaacacagtggcagcagcacgactgaaccgaaaactcaagagaacaccgttcaagactccacaagtccacctccgcagccagaggtcgtcgacaccgaggactcttcagctgataagaactcatcagagaatcagcagcagcagggcgatacggccaaccagaaggagaagctgaagaagcctgacaagatcctgccgtgcccccggtgtagcagcatggacaccaagttctgctactacaacaactacaacatcaaccagccgcgccacttctgcaagaactgccagaggtactggacagcgggtggtgccatgcgcaacgtgcctgtgggtgcaggccgacgcaagagcaagagcgtatcggccgcttcccatttcctccagagggtcagggctgctctgcccggtgatcctcctctctatgccccagtgaagactaatggcaccgttctcagcttcggctccgacctgtccaccttagacctcacagaacaaatgaagcatctaaaagataagtttatcccaacaaccggtatcaagaacaccgacgagatgccagtcggtttgtgtgctgaaggattgtcgaaaacagaagaatcgaaccaaacgaacctaaaggagaaagtttcagcagatagatctccaaatgttgcacaacacccatgcatgaacggaggagccatgtggccatttggcgtggcaccaccacctgcttattacacttcaagcattgcaattccattctatccagctgcagcagctgctgttgctgcatactggggctgcatggttccaggagcttggaacgctccatggccaccgcagtcccaatcccaatcggtttcatcatcaagtgctgcttctccagtatccacaatgaccaactgcttcagattaggaaagcaccctagagatggtgatgaggaactggatagcaagggtaatggcaaggtgtgggtgccgaagacggttcggatcgacgatgtcgacgaggtggccaggagctctatctggtcgcttattgggatcaagggtgacaaggtgggagcagatcatggcagaggatgcaagcttgcaaaggtttttgagtcaaaggatgaggcaaaggcatcaactcacacagcgatcagcagcttgccattcatgcaggggaacccggctgccctaacacgctcggtgaccttccaagagggatct

SEQ ID NO: 4737 - DNA, 525 bp, Oryza sativa; identical to SEQ ID NO: 4728

SEQ ID NO: 4738 - DNA, 1014 bp, Oryza sativa
atgggctgctccatctcggggctcaacgccctctacgacgcggcgacgggcggcggcgacgtgtggatcaacgagcgccgcttccgcgtcctgcgccagattggggagggcggcttcgccttcgtctacctcgtcagggagcaccaggcctccgccgacgccgcccgcggccggagcccctccctcgcctcagaggatgggacatatgctatgaagaaggtgctgatacagagcaaggaacagctagatctggtgaaggaggagatccgtgtttcgtcattgttcaaccatcctaacctgcttccgcttcttgatcatgccgtgatagcagttaagaatcaacagggagattggaaccatgaagcctacttgctcttccctgtctatatcgatggtactctgtttgacaatgccaaagtcatgcaatccaggaaggaattctattcaacaatcgatgttttgagaatattccaacagctctgtgaaggactgaagcacatgcacagttttgatccaccatatgcccataatgacgttaagactggcaatgttcttataactcacagaaaaggacaagcacctcttgcaactttaatggattttggaagtgcaaggcctgcaagaaaagaaatccgttctcgtgctgaagcattacgattgcaggaatgggccgctgaacattgctctgcgccttaccgtgcacctgaactgtgggactgcccaagtcatgccgatatcgatgagagtgacagacatttggttctcttagtatgcaccctttatgctatcatgtacaatgtttcgccatttgagtatgctctcggtgaatctggagaaagcttgcaattagccattgtcaactgcacgctgaagtggccggcaggacccagccctccttaccctgatgcacttcatcagtttattacctggatgcttcagccacaacctgcaatgcgccctcacatcgatgacataattctacatgtcgaaaagcttatggaaaaatattcgtct

SEQ ID NO: 4739 - DNA, 525 bp, Oryza sativa; identical to SEQ ID NO: 4728

SEQ ID NO: 4740 - DNA, 696 bp, Oryza sativa
atggccggccgtgcgacggcgacggcgacggcggcggggaaggacaggtccagcttcgccgtcacctgtagcctcctcagccagtttctcaaggagaagaagggcggcggcggcgggctgcaggggctcggactcggcttgcggccggcgccggcggcgccgaccgccgtgggagctggaggtgctttccggccgtcgccgaccaccatgaacttgctgacggggctcgacgcgccggcggtggaggtggagccaaacacggcggaaacagcggccgacgagctgcctctcatcaaggccccggccgatcagcaaagcgacgaaagtgcaagtgaggcagctggagagaaggctcaacagctgaccatcttctacggtggaaaagtagtcgtctttgagaacttcccgtccaccaaggtcaaggatctcttacaaatcgtaagcacaggcgatggcgtcgacaagaacaccggcaccgcggcaacgcagagcctgccccgacccgcacacaacagtcttcccgatctgccgattgcaaggaggaactcgctccataggtttctcgagaagagaaagggcaggatgaatgcaaatgctccataccaagctaactgcaccgctgcaccgtccaagcaagctaacggtgacaaatcttggcttgggtttggccaagagatgacaataaagcaggagata

SEQ ID NO: 4741 - DNA, 1329 bp, Oryza sativa
atgagggagtgcatctcgatccacatcgggcaggccggtatccaggtcgggaacgcgtgctgggagctctattgcctcgagcatggcatccagcctgatggacagatgcccggtgacaagaccgttgggggaggtgatgatgcttttaacaccttcttcagtgagactggtgctgggaagcatgtcccccgtgctgtcttcgtcgatcttgagcctaccgtgattgatgaggtgaggactggtgactaccgccagctcttccaccctgagcagctcatcagtggcaaggaggatgcagccaacaactttgcccgtggtcactacaccattggcaaggagattgttgatctgtgccttgaccgcatcaggaagcttgccgacaactgcactggtctccagggcttccttgtgttcaacgctgttggaggaggaacgggctccggtctcggttcccttctccttgagcgtctctctgtggactatggcaagaagtccaagctcgggttcaccgtgtacccgtcccctcaggtctccacctctgtaggtgtgagccatacaacagtgtcctctccacccactcccttcttgagcacaccgatgtccgctgtactgctcgacaatgaggccatctatgacatctgccgccgctccctctacattgagcgcccaacctacaccaacctcaacaggcttgtgtcccaggacatctactcactgactgcctccctgaggttcgatggtgctctgatggtggatgtcaacgagttccaaaccaacctggagccctaccccgaggatccacttcatgctttcctcctacgccccggtgatctcgggcgagtatgcctaccacgagcagctctccgtggcggagatcaccaacagcgccttcgagccgtcctccatgatggccaagtgcgacccgcgccacggcaagtacatggcgtgctgcctgatgtaccgcggcgacgtggtccccaaggacgtgaacgccgcggtggccaccatcaagacgaagcgcaccatccagttcgtggactggtgccccacggggttcaagtgcggcatcaactaccagccgcccagcgtcgtcccggggggagacctggccaaggtgcagagggccgtgtgcatgatctccaactccaccagcgtcgtcgaggtgttctcccgcatcgacatcaagttcgacctcatgtactccaagcgcgccttcgtccactggtacgtcggcgagggcatggaggagggggagttctccgaggcccgcgaggacctcgccgcgctggagaaggactacgaggaggtcggctccgagttcgacgatgg

SEQ ID NO: 4742 - DNA, 465 bp, Oryza sativa
atgcagatcttcgtgaagaccctgacggggaagacgatcacgctggaggtggagtcctcggacaccatcgacaacgtgaaggcgaagatccaggacaaggaggggatcccgcccgaccagcagcggctcatcttcgccggcaagcagctggaggacgggcgcaccctcgccgactacaacatccagaaggagtcgaccctccacctggtgctccgcctccgcggcggcgccaagaagcgcaagaagaagacgtacaccaagcccaagaagcagaagcacaagcacaagaaggtgaagctcgccgtgctccagttctacaaggtggacgacgccaccggcaaggtcacccgcctccgcaaggagtgccccaacgccgagtgcggcgccggcaccttcatggccaaccacttcgaccgccactactgcggtaagtgcggcctcacctacgtctacaaccagcaggct

SEQ ID NO: 4743 - DNA, 591 bp, Oryza sativa
  misc_feature (4)..(5): n = any nucleotide
  misc_feature (72)..(74): n = any nucleotide
atgnnaggtggcaaggacaagcatgacgagagcgacaagggcttcttctctaacatgatgcacggcgtgcgnnncggccatgggtatcctcctcaccagggataccctctccagggctacccgccgccgccgggagcgtacccgcctcctccgggggcttatccccctcctcctggggcttaccctccaccacctggggcataccctccacagcatgggtaccctcagcctggtggctaccctccacctggtggttacccccaacatggtggctaccctcctgcgggctaccccggatcatctgggcaccagggcggccatgggagtagcggtggaggacacatgggagcaatgctggctggaggcgccgctgcggctgctgcagcctatggggcacacaagatctcttctcatggccatggtggacacatgggctatggaggccatggaggctttggtggttacggccatggctacggcggtcaccacggcggcaagttcaagcatggcaagcacggccaccatggcaagttcaagcatggcaagcatgggcacggcatgttcggtggtggcaagttcaagaagtggaag

SEQ ID NO: 4744 - DNA, 591 bp, Oryza sativa
atgggaggtggcaaggacaagcatgacgagagcgacaaggggctcttctctaacatgatgcacggcgttgccggcggccatgggtatcctcctcaccagggataccctcctcagggctacccgccgccgccgggagcgtacccgcctcctccgggggcttatccccctcctcctggggcttaccctccaccacctggggcataccctccacagcatgggtaccctcagcctggtggctaccctccacctggtggttacccccaacatggtggctaccctcctgcgggctaccccggatcatctgggcaccagggcggccatgggagtagcggtggaggacacatgggagcaatgctggctggaggcgccgctgcggctgctgcagcctatggggcacacaagatctcttctcatggccatggtggacacatgggctatggaggccatggaggctttggtggttacggccatggctacggcggtcaccacggcggcaagttcaagcatggcaagcacggccaccatggcaagttcaagcatggcaagcatgggcacggcatgttcggtggtggcaagttcaagaagtggaag

SEQ ID NO: 4745 - DNA, 1287 bp, Oryza sativa
atggcgggcgcggtgtcggcgctgttccttctggacatcaagggccgcgtcctcgtctggcgcgactaccgcggcgacgtctccgccctccaggctgagcgcttcttcaccaagctcctcgacaaggagggcgactcggaggcgcactcgccggtggtctacgacgatgccggggtcacctacatgttcatccagcacaacaacgtgttcctactaaccgcctcccgccagaactgcaacgccgccagcatcctcctcttcctccaccgcgtcgttgatgtgttcaagcactatttcgaagagttggaggaagagtcgctgagggataactttgtcgttgtgtatgagttgcttgatgaaatgatggattttgggtacccacaatacacggaggcgaaaatcttaagtgaattcattaagacggatgcgtacaggatggaggtatcacagaggccacctatggcagtgacaaatgccgtgtcatggcggagtgagggtattcggtacaagaagaatgaagtgttcttggatgttgtggagagtgttaacattcttgttaacagcaatgggcagattgtgagatcagatgttgttggggcactgaagatgcggacatatttgagtggaatgcctgagtgcaaacttggattgaacgatagggttcttttggaggctcaaggccgagctactaaaggaaaagcaatagatcttgatgatattaaatttcaccagtgcgtgaggttggctagatttgagaatgatagaactatatccttcatacctcctgacggatctttcgatctaatgacatacagacttagcacccaggtaaaaccacttatctgggtggaagcacaaattgagaaacattcaagaagccgaatagaacttatggtgaaagcaagaagtcagtttaaggaaaggagcacagcaacaaatgttgaaattgaagtgcctgttccttcagatgctacgaaccctaatataagaacttcaatgggctctgctgcatatgcacctgagagagatgcaatggtctggaaagtaaaatcatttcctggtggcaaggattacatgtgcagagctgaatttagtcttccaagtataactgcagaagaagcagctcctgaaaagaaggcaccaatacgagtgaaatttgagataccatatttcactgtgtcgggtattcaggttcgctatctgaagatcattgaaaagagtgggtaccaggcgcttccttgggttagatacattacaatggctggtgaatacgaactgagacttata

SEQ ID NO: 4746 - DNA, 510 bp, Oryza sativa
atggcctcctcggccacctccgtggctccattccaagggctcaagtccaccgccgggctccccgtcagccgccgctccaccaactcgggcttcggcaacgtcagcaatggcggaaggatcaagtgcatgcaggtgtggccaattgagggcatcaagaagttcgagaccctatcgtacctgccaccactcaccgtggaggatcttttgaagcagatcgagtacctgcttcgatccaagtgggtgccttgcctcgagttcagcaaggttggattcgtctaccgtgagaaccacaggtctcccgggtactacgatggcaggtattggaccatgtggaagctgcccatgttcggctgcaccgatgccacccaggtgctcaaggagctcgaggaggccaagaaggcctaccccgatgcctttgtccgtatcatcggcttcgacaacgtcaggcaggtgcagttgattagcttcatcgcctacaagcccccaggttgcgaggagtctggtggcaac

SEQ ID NO: 4747 - DNA, 525 bp, Oryza sativa; identical to SEQ ID NO: 4728

SEQ ID NO: 4748 - DNA, 750 bp, Oryza sativa
atgccgatccgcaacatcgccgtggggagccaccaggaggtgtaccacccgggtgcactcaaggcggcgttggccgagttcatctccaccctcatcttcgtcttcgccggccagggctccggcatggccttcagcaagctgaccggcggcggagcgacgacccccgccgggctgatcgcggcggcggtggcccacgccttcgccctgttcgtggcggtgtccgtcggcgccaacatctccggcggccacgtgaacccggccgtgaccttcggcgccttcgtcggcggcaacatcaccctgttccgcggcctcctctactggatcgcccagctcctgggctccaccgtggcgtgcttcctcctccgcttctccaccggcgggctcgccaccggcaccttcggcctgaccggcgtctccgtgtgggaggccctggtgctggagatcgtcatgaccttcggcctcgtctacaccgtgtacgccaccgccgttgaccccaagaagggcagcctcggcaccatcgcccccatcgccatcggcttcatcgtcggcgcgaacatcctcgtcggcggcgcgttcgacggcgcctccatgaacccggccgtctccttcggcccggccctcgtcagctggtcctgggagtcccagtgggtgtactgggttggcccactcatcggcggtggcctcgccggcgtcatctacgaggtcctcttcatctcccacacccacgagcagctccccaccaccgactac

SEQ ID NO: 4749 - DNA, 750 bp, Oryza sativa; identical to SEQ ID NO: 4748

SEQ ID NO: 4750 - DNA, 525 bp, Oryza sativa; identical to SEQ ID NO: 4728

SEQ ID NO: 4751 - DNA, 525 bp, Oryza sativa; identical to SEQ ID NO: 4728

SEQ ID NO: 4752 - DNA, 1311 bp, Oryza sativa
atgggcaagcaccatgtcaccctgtgttgtgtcgtttttgctgtgctctgcctggcgtccagcttagcacaagcccaagttctcttccaggggtttaactgggagtcgtggaggaagcaaggcgggtggtacaactttctgcacgagaaggtggaggagatcgccagcacgggcgccacccacgtctggctcccgccgccgtcgcactctgtctcgccgcagggttacatgccggggcggctctacgacctggacgcgtccaagtacggcacggaggcggagctcaagtcgctgatcgaggcattccacgacaagaacgtcgagtgcctcgccgacatcgtcatcaaccaccgctgcgccgactacaaggacagccgcggcgtgtactgcgtgttcgagggcggcacgcccgacggccgcctcgactggggccccgacatgatctgcagcgacgacacgcagtactccaacggccgcggccaccgcgacaccggcgccgggttcggcgccgcgcccgacatcgaccacctcaacccgcgtgtccagcgggagctcaccgactggctcaactggctcaggaccgacctcggcttcgacggctggcgcctcgacttcgccaagggctactccgcgccgctggcgaggatctacgtcgacaacaccaacccgacgttcgtcgtcggcgagatctggagctcgctcatctacaacggcgacggcaagccgtcgaccaaccaggacgcggacaggcaggagctggtgaactgggtggagggcgtcggcaagccggcgacggcgttcgacttcaccaccaagggcatcctccaggccgccgtgcagggcgagctgtggaggctccacgacggcaacggcaaggcgcccggcctcatggggtggatgcccgatcaggccgtaaccttcgtcgacaaccacgacaccggctcgacccagtcgctctggccgttcccttccgacaaggtcatgcagggctacgcctacatcctcactcaccctggcatcccatgcatcttctacgaccatgtgttcgactggaacctgcagcacgagatcgcgacgctggctgaaatccggtcaaggaacgggatccatgcggagagcacgctggacatcctcaaggccgagggggacatctacgtcgccatgatcgacggcaaggtgatcaccaagctcgggccgaggtacgacgccggcgggatcatcccctccgacttccatgtcgtggcgcacggcaacgactactgcgtctgggagaaggaaggcctcagggttcctgccggtagaaagcactat

SEQ ID NO: 4753 - DNA, 1353 bp, Oryza sativa
atgagggagtgcatctcgatccacatcgggcaggccggtatccaggtcgggaacgcgtgctgggagctctattgcctcgagcatggcatccagcctgatggacagatgcccggtgacaagaccgttgggggaggtgatgatgcttttaacaccttcttcagtgagactggtgctgggaagcatgtcccccgtgctgtcttcgtcgatcttgagcctaccgtgattgatgaggtgaggactggtgactaccgccagctcttccaccctgagcagctcatcagtggcaaggaggatgcagccaacaactttgcccgtggtcactacaccattggcaaggagattgttgatctgtgccttgaccgcatcaggaagcttgccgacaactgcactggtctccagggcttccttgtgttcaacgctgttggaggaggaacgggctccggtctcggttcccttctccttgagcgtctctctgtggactatggcaagaagtccaagctcgggttcaccgtgtacccgtcccctcaggtctccacctctgtggttgagccatacaacagtgtcctctccacccactccctccttgagcacaccgatgtcgctgtcctgctcgacaatgaggccatctatgacatctgccgccgctccctcgacattgagcgcccaacctacaccaacctcaacaggcttgtgtcccaggtcatctcctcactgactgcctccctgaggttcgatggtgctctgaatgtggatgtcaacgagttccaaaccaacctggtgccctacccgaggatccacttcatgctttcctcctacgccccggtgatctcggccgagaaggcctaccacgagcagctctccgtggcggagatcaccaacagcgccttcgagccgtcctccatgatggccaagtgcgacccgcgccacggcaagtacatggcgtgctgcctgatgtaccgcggcgacgtggtccccaaggacgtgaacgccgcggtggccaccatcaagacgaagcgcaccatccagttcgtggactggtgccccacggggttcaagtgcggcatcaactaccagccgcccagcgtcgtcccggggggagacctggccaaggtgcagagggccgtgtgcatgatctccaactccaccagcgtcgtcgaggtgttctcccgcatcgacatcaagttcgacctcatgtactccaagcgcgccttcgtccactggtacgtcggcgagggcatggaggagggggagttctccgaggcccgcgaggacctcgccgcgctggagaaggactacgaggaggtcggctccgagttcgacgatggtgacgagggtgatgagggtgacgagtac

SEQ ID NO: 4754 - DNA, 465 bp, Oryza sativa
atggcgcccaaggcggagaagaagccggccgcgaagaagcccgcggaggaggagcccgcggcggagaaggccgagaaggccccggccgggaagaagcccaaggcggagaagcggctccccgccggcaagggcgagaagggctccggcgaggggaagaaggaccgcgctgggaggaagaaggcgaagaagagcgtcgagacctacaagatctacatcttcaaggtgctcaagcaggtccaccccgacatcggcatctcctccaaggccatgtccatcatgaactccttcatcaacgacatcttcgagaagctcgccgccgaggccgccaagctcgcccgctacaacaagaagcccaccatcacctcccgcgagatccagacctccgtccgcctcgtcctccccggcgagcttgccaagcacgccgtctccgagggcaccaaggctgtgaccaagttcacctccgct

SEQ ID NO: 4755 - DNA, 564 bp, Oryza sativa
atggacaagaagcagtgcggcgccaagggcggaggcggcggcaatgctcgccggagcgcgacgggcggcggcgcggggaggatgcatcggaaggggaagcatcagggcgacggcggaggcggaggagggaagaggagggagatcaaggtggtgtacatcgccaacccgatgcgggtgaccaccagcgaggagggcttccgcgcgctcgtgcaggagctcaccggccggcacgccgacccgtccaagtaccgcggcggcggcggcggcgcgcccgtcgacgagaccagcggcggtggtggcggcggcggcggcgagatgatgcagggcgcggcggcgatgatgcagcccagcccgggcagcaccgtggactcgtcgtcgacggaccacggcggcgccggcgccggcgggcagggcgccggcctgcaggcggcggcgctggacgacgacgagaacagcttcatcgcgccggagctgatcgacaacaggtactccgtctgcttctcgccgccgacgttcctctacggcggcggctcgcacacctacgacggcgacgactacggtttg

SEQ ID NO: 4756 - DNA, 582 bp, Oryza sativa
atgggaggtggcaaggacaagcatgacgagagcgacaaggggctcttctctaacatgatgcacggcgttgccggcggccatgggtatcctcctcaccagggataccctcctcagggctacccgccgccgccgggagcgtacccgcctcctccgggggcttatccccctcctcctggggcttaccctccaccacctggggcataccctccacagcatgggtaccctcagcctggtggctaccctccacctggtggttacccccaacatggtggctaccctcctgcgggctaccccggatcatctgggcaccagggcggccatgggagtatcggtggaggacacatgggagcaatgctggctggaggcgccgctgcggctgctgcagcctatggggcacacaagatctcttctcatggccatggtggacacatgggctatggaggccatggaggctttggtggttacagccatggctacggcggtcaccacggcggcaagttcaagcatggcaagcacggccaccatggcaagttcaagcatggcaagcatgggcacggcatgttcgggtgttggcaagttcaa

SEQ ID NO: 4757 - DNA, 804 bp, Oryza sativa
atggtcaccgcgctagcccacgtcatccgcgccgcccccgacctgcacctcccccaccacccatcctcctccgcctccgccgccgcccacccgcagcaggcttcttccttctacccgaccgccgccgccgccgcctcctcgccgtccgaccagctcgccgccgccgccgctgccgaagagcaagggaggaggcggcactacagaggtgttcgacagcggccatgggggaagtgggcggcggagataagggacccgaagaaggcggcgagggtgtggctggggacgttcgacacggcggaggacgccgccatcgcctacgacgaggcggcgctccggttcaaggggaccaaggccaagctcaacttccccgagcgcgtccagggccgcaccgacctcggcttcctcgtcacccgtggcatcccccccgccgccacccacggtggcggctactacccctcgtcgtcgccggcggcggcggcatgccccccgccgcggcagcagcagacggtcgtgccgtacccggacctcatgcggtacgcgcagctgctgcagggcggcgtcggcggcagttacatgccgttcggcggcgccgcgacgatgtcgtcgtcgacggtgtcgtcctcgtcggcgccgcagatactcgacttctcgacgcagcagctcatccgggccggcccgccgtcaccaatgccatcgtcgggctccggctcggcgaccgcggcggcgtcgtccacgacgtcggcgtcgtcgcccggtgcatggccgtacggcggctcggagcgcaagaagaaggattcgtcgtcg

SEQ ID NO: 4758 - DNA, 750 bp, Oryza sativa
atgccgatccgcaacatcgccgtggggagccaccaggaggtgtaccacccgggtgcactcaaggcggcgttggccgagttcatctccaccctcatcttcgtcttcgccggccagggctccggcatggccttcagcaagctgaccggcggcggagcgacgacccccgccgggctgatcgcggcggcggtggcccacgccttcgccctgttcgtggcggtgtccgtcggcgccaacatctccggcggccacgtgaacccggccgtgaccttcggcgccttcgtcggcggcaacatcaccctgttccgcggcctcctctactggatcgcccagctcctgggctccaccgtggcgtgcttcctcctccgcttctccaccggcgggctcgccaccggcaccttcggcctgaccggcgtctccgtgtgggaggccctggtgctggagatcgtcatgaccttcggcctcgtctacaccgtgtacgccacccccgttgaccccaaaaagggcagcctgggcaccatcgcccccatcgccatgggtttcatggtcggcgcgaacatcttcgtcggcggcgcgttcgacggcgcctccatgaacccggccgtttctttcggcccggccctcgtcagttggtcttgggagtcccagtgggtgtactgggttggcccactcatcggcggtggcctcgccggggtcatttacgaggtctttttcttttcccacacccacgagcagctccccccccccgattat

SEQ ID NO: 4759 - DNA, 834 bp, Oryza sativa
atgccggttgccggagcggggtggtgggatctcgtgaacggctcgacggcgtggcaggacgggatcttcctctccctcgccgctctctacggcctcgtcgccgcatcctccttcatccaagttgttaggatacagtacagagttcctgaatatggatggacaacacaaaaggtctttcaattacttaatttcattgtgaatggagcgaggtgttctatctttgcagtccgccgccaagtccaacaagtgaaccctgagatctttcagcatgttattcttgatcttccggggcttgcattcttcacaacgtatgcaatgttggcacttttctgggctgagatatcttatcaagcacgtggtctagagactgaagggcttagatcaggtttctacactattaatggtgtaatatatgtgatacaggttctgctgtgggcgttgttgtggcacaatccaaacccatctatgatagtcctttcgaagttgttcattgcaggcctatccttttctgcagccttgggttttctgctatatggagggaggcttttcttcatgctgaagcgttttcctattgagtcaaaagggaggcagaaaaaactgagggaagttgggagagttgccactatatgcttcctttgtttcttggcacgatgcattatgatgtgctttgatgcatttgacaaaaaagctgaccttgatgtgcttgaccatccaattcttaatttcatctattacctgatcgttgaaattcttccttcatctcttgtcctgtttattctgaggagaatcccttataagttacggctcgcccagtatcatcccctcaacagtgtt

SEQ ID NO: 4760 - DNA, 672 bp, Oryza sativa; identical to SEQ ID NO: 4731

SEQ ID NO: 4761 - DNA, 300 bp, Oryza sativa
atgtcggccgccggggaggaggacaagaagccggcggggggagagggcggcggcgcccacatcaacctcaaggtcaagggacaggatgggaacgaggtattcttccgcatcaagagatctacgcagctgaagaagctgatgaacgcctattgtgaccgtcagtctgtggatatgaatgctattgcattcctatttgatggtcgtaggctccgtggcgagcagacccctgacgagctcgagatggaagacggggacgagatcgacgccatgctccaccagactggaggctgcctgcctgcc

SEQ ID NO: 4762 - DNA, 525 bp, Oryza sativa; identical to SEQ ID NO: 4728

SEQ ID NO: 4763 - DNA, 414 bp, Oryza sativa
atggcgggcaagggaggcaaggggctcctcgcggccaagaccacggcggcaaagagcgccgacaaggacaaggacaagaagaaggcccccgtctcccgctcctcccgcgccggcctccagttcccggtggggcgtatccacaggcagctcaagtcgagggcgtcggctcatggccgcgtcggcgccaccgccgccgtgtactccgcggcgattctcgagtacctaaccgccgaggtcctggagctggccggcaacgcgagcaaggatctcaaggtgaagcgtatcaccccgcgccatctccagctagccatccgcggggatgaggagctcgacacgctcatcaagggcaccatcgccggcggtggcgtcatcccccatatccacaagtcgctcatcaacaagacctccaaagag

SEQ ID NO: 4764 - DNA, 678 bp, Oryza sativa
atggcggcggcggcgcagaggctcctggcggccagcacgaagatcgtaggggtgggccgcaacttcgtcgcccacgccaaggagctcgggaaccccgtccccaaggagccggtgctgttcctgaagcccacctcgtcgttcctccacgcgggcgtggccggcgccgccatcgaggtgccggagccggtcgagtcgctgcaccacgaggtcgagcttgccgttgtcatctcccagcgcgcgcgcgacgtccccgaagcatccgccatggacttcgtaggaggttatgcacttgctttggacatgacagcaagagaacttcagtctgcggctaagtctgcaggtcttccttggactttgggtaaagcacaggacaccttcactccaattagtgcagtgattccaaaatcagatgtagctaatcctgatgatctagagctctggctaaaggttgatgatgaacttaggcagaagggatctacaagtgatatgatattcaagataccatctctaataagttatatcagttccatcatgacattaatggagggtgatgttatactgaccggtactcctgagggtgtaggcccagtacgaccaggacagaagatcaaagctggtataaccggcctcattgatgttgagtttgatgttcagaagcgcaagcggtcattttctact

SEQ ID NO: 4765 - DNA, 564 bp, Oryza sativa; identical to SEQ ID NO: 4755

SEQ ID NO: 4766 - DNA, 2811 bp, Oryza sativa
atgttccgcagcaccgtccccgagcgcgccatgttccccaccgcctacacctacgatagggtgtttggtcctgattcctctacaaggcaggtctacgaggaaggagcgaaagaagttgctctatcagttgtcagtggaatcaactcaagcatattcgcgtatgggcaaacaagcagtggcaagacttacacgatgaccgggataaccgagtatagtgttctcgacatctatgactacatcgaaaagcatcctgaaagagaattcattttgagattttcggcaatagagatatacaatgaagctgtgagggacctcctgagccacgacaccacacccctcagacttcttgatgatccggagaaaggaactaccgtagagaaactcactgaggaaaccttgagggacaaggatcatcttaggaaccttcttgctgtgtgtgaagctcaaaggcagattggagaaactgctttgaatgaaacgagttcaaggtcccatcaaatactcagattgacaattgaaagttctactagacagtatttgggaagaggcaactcaagcacccttgtagcttgtgtgaactttgttgacctagcaggaagcgagcgtgcatctcagactgcttcagctggagtgaggttaaaagaaggtagccatatcaatcgaagtcttcttacactgggaaaagttgttcggcaactcagtaagggaagaaatggccatatcccctacagagattcaaagctgactcgtatattacagtcttccttgggaggcaatgcaagaattgctattatctgcacaatgagccctgcacggagtcatattgagcaatccaggaatacactattgtttgctacttgtgcaaaggaggtagttacaaatgcacaggtcaatgtagtgatgtctgataaggcactcgtgaagcatctacaaagagaacttgaaagattacaaagtgagattaaatttccggcgccagcctcctgcactactcatgctgaagcattgagggagaaggatgcacaaattaaaaagctggagaaacagctaaaagaattgatggaagaaagagatactgtgaagtctcaacttgactgcttgcttaaaagcgattgtgatgaccatagtgacggccgcgttgcgaagcgatgggatgagcatagtcgatcctcagagtcttttgcacggaatgcgtctgaagaagcattttcagtttcagatacttctggtgttccttaccaggatcaagataatgctgtgtttaatggatcctatgtcttcagtgatgaccgtgatgatattgtattccctgttcaaacagtggatcttcctgaagaaacaaagcatgaaaaatttatgtcaccttggcaccctcccagccaccatagttcttctgattgcatagagtcatatcatatgacagaagcggcttccagaactgcatcagaagtctctgaagagcattgtagagaagtccaatgcatagatatacatgagcatagaagaagcacaagtcacaaattcgaccttttgctgccccaggacaccgagttccaaacacctgaattagagatctccaaagaagcagtccctcaacctgatgaagaccaagaacttgagagcataacaaacagaatggaagatcctaccaggatgtgccctgtcgaggaggagcaacaagatgagatcgtagatacatgtgaatctaatggtaccacagacaatgatgtcaagctatatacatgtgattctaacatttcttttgacattcagaaaccttaccctaatggatgtctgactgtaaaaaggtgtatactgagctccaaggatagggcgttgtctagaagtaaaagctgcagggctagctttatgattattccaaatagttggtttgatgattccgagtacaccagccagacaccacctaatgaaatcttgaagcataccccaagaaggtttgacaaggttaggagaagcttgtatccagaaaatgataacccttcttcagtagaccgttctgagttttctggtgaagtttcttctgatgaagtagtgaaggacatgagcaccattgatgaagtagccaaagacatgtgccccagcgacgcagaacaagaaactctcaccagtgacatcagttgtctcaccaagttgaagaagactgatagtgaccatgaggatgaacttgatgagtatcaggatcagcagtctattagagatggatctacaaccttgagaactgtcaaagatgttggcatagattcatcactgagtgcctctccttctcgttggcctattgattttgagaagatgcggcaagagattattcagttgtggcacgaatgcaacgctcccatcgtacacagaacttacttcttcctcctcttcaagggagatccagcagataacatctacatggaggtggagcacaggagactgtccttcattaggaggtccttcagtgccagccctgcaggaggcgagcttaattctgccgtcgtatcaagcctgaaaaatcttcgacgcgaaagggacatgctctacaagcagatgcttaagaagctcaccaatggggagaaagagcgcgtttacgctagatggggaatcgatctgagctcgaaacagcgaagattgcagctatctcgtctcgtctggacgcagaccgatatggaacacatcagggagagtgcatcccttgttgcgaagctgattgagctgctggagccagcacaggcactgaaggagatgtttggactgaacttcacactagctccccgatctgaacggcgatccttcggccttctaggtacc

SEQ ID NO: 4767 - DNA, 348 bp, Oryza sativa
atggcgagacccgccatcgtggcggcgcccgcgctgctgctgctggcgctgctcatcgcgctggccaccgggggagccgacgcggcgccgggcgaggtgccgctgagctgggagctcggggttgtcggcgccgacgacgcgttcggcttcccgggtgaggaggcggcggacagcgccaccgcggtggtgcggcgggtgctgcagcaggggagctacatcagctacggcgcgctgcggcgcgacacgacgccgtgctccgtgcgcggcgcgtcctactacaactgccagcccggcgcggaggccaacccctactcccgcggctgctccgccatcacccagtgcagggga

SEQ ID NO: 4768 - DNA, 553 bp, Musa acuminata
  misc_feature (12)..(12): n = any nucleotide
  misc_feature (510)..(510): n = any nucleotide
  misc_feature (536)..(536): n = any nucleotide
ttcaaagatttnctccagatcatgaaatcgtccctactattcagctagtacacgccaactattgcattcatggcataaacgaagtctcagactccacaagtaaacaaggtagattgaaggttttccacgccaggagtagcaggtcactctagtagataccaagcggcataattgcaattaccagtagagaagcagctttcttcggcgttgcacttggctacaggacaccatcatatgggagaaatccgtggcggagggcagcacgccacattgtctctatgttgctcaccgtctcaccacattcattcttgttccattgctccaacgcatgaactattccggccacacgccatgcactcatcacccttcttggcaaccagttctcacaggcgtgcaggttttggtatgcctttgggaccagcattgcaggagtgcagtggtagatacaatcttctcgtactactctgggggggattgagaataagggatgaaatggatgccttcactcgngttcctttgttcttgggcaactcacnccattcccaagtaacca

SEQ ID NO: 4769 - DNA, 496 bp, Musa acuminata
atttatttcactactatttaaatgtcatcgtatagggcctgtttggtaaatccactacagtaatttgcatactctatacaaacaaagtgtgcagacgttctttttcaagcccaatagtggtaaaataaatccattcaggcataagatcacagattcttcgtgaagcatggaatttccgatgataccagctagaaggtgattagattgctcttctgttgcttatgctgtttttcaggattttgatcctcagaagtgctccctcctattttaccgaagatcatctcatcaagatcatcaaggatgccatcatctccacctgaccttgtttcggaacctggtggttttctgatgagggcatcttctctggtagctcgaggagactcctcaggttccacggcaactggtatcactgcgggctctggttcagaattcacaacaggaggcttccgcagctcttcatacttggagaggatcttctgaagttcatcatttacat

SEQ ID NO: 4770 - DNA, 364 bp, Musa acuminata
attcctttctctataacatttatatttaaactgaactgaactgaactgaacaaactcctaacaatttacaactagaaatgctgaatacttggctactcgtcgtcctcgtactgcaacaagctgaaccctctcggttgtcccttcaacaggctctcctgaatccgctctttgatgaccgttcccatttgatggcagccttcctcaaacttttcaagaaaaccagcaacccagcgatcggcgttttccacccactcgtcgtgaagcagccccaacttcttccccactttttcttgctgttgtttaactttgtcatacagcttctcaaattccatgttcaccctcagccgtttttccttcatatagc

SEQ ID NO: 4771 - DNA, 561 bp, Musa acuminata
  misc_feature (10)..(10): n = any nucleotide
  misc_feature (37)..(37): n = any nucleotide
  misc_feature (421)..(421): n = any nucleotide
  misc_feature (452)..(452): n = any nucleotide
  misc_feature (553)..(553): n = any nucleotide
atttggttgntcttagtatcttgcaaacaatatacantatgttttcattatcaaaagactacttcaataatatcatccatgtatgaaagctaaacttgatggtaaggaaatgtattcagcaaactcccaaatatttttaagcaaaatatgaatggttttggcatgacttctaccataacatgagtgatgtctcacttaatctgcatattaaagaaatctacagccttaccagccacccatttgaatgagcctacacctttgacgacacccgtgttagcagagatgagcagtgcggtggtgcagctacaagtttctatgactatatgcatcacctgacgggtccttcaaaagctcagtttcaaaatcttgtatctagcttcaactcttccataactgacttccatccatttagccagttttntctatgcaactgtgtaaattttcagtatttntgatgtgtcacacacaacaaggtttctgagtcagtcggagtagtacacagccaattgacctttctgttcatgttaacagtcaacttaaatgagtgctgcanttgcttgt

SEQ ID NO: 4772 - DNA, 593 bp, Musa acuminata
aatgattactcgacaattgcagatatcaactacagaatccatttccaatttacaagatagggtagaaacagaactaagcaactcatcgcaacgtaatcatccacttatatactacagaacgaagcttggatctatgagtacatatagcttctacagatggttaaatagcacgtctcctgaattctattactggtacaataacgctcccttcaaatggcataaattctgtcaatctcagaatcagatatctccgagttatgttgccatgagtttgaaccgctccttgattttgtcctcttcctcatagcacggctgtgcttcgatttaaccacatagaaagtcatggtcccaagaacaccagtcattattaggccacctatcagtgtaaccagaatagctgcccatcggatatgccggcccaacacaatgaatgaagatgcgataaaagcaacggtagtgcagacagaagccaaccacatcagcttgttaattatctgaatgacccgcctctctgcctttgtttctcccctgacaagtgttatctgaaccaccaccactgctaatgaagtgaacagggcatagcattgaaaatg

SEQ ID NO: 4773 - DNA, 555 bp, Musa acuminata
  misc_feature (5)..(5): n = any nucleotide
  misc_feature (8)..(8): n = any nucleotide
  misc_feature (476)..(476): n = any nucleotide
  misc_feature (538)..(538): n = any nucleotide
ccgtntcnacttggcattgctataaacatgatccactttacaatgattgccaaaaaaatggaaaagaagctttggagtggctgccgattatggccaaatccaactcttgaggttacgcaatatacttatgcacagttcttaagagctcaaggtgtcaagtttacagatatctcttgtgccaccggagggctgtgtgtttcctggtatgaggggatgacaagccgctgtaaggacctcagagcagttgtcagttgcgcaaatgaagggcgcaggtttgggtccgtttggcagcattcccaaatgatgcttgaaaccaggggatcaacttcttttggaatgtcaagtcgtcgttcctgaaacccaacagcaccaaccacttgcattgggttcattccactccatggcatcctcagcgttgcaagttcccacaggattactccaaaactatagacatcgcacttttcattggaattttncattgcgcaacacctctggtgccatccactcaggtgttcagctgtggatttcgatgataganatgtactatgcttcaag

SEQ ID NO: 4774 - DNA, 473 bp, Musa acuminata
  misc_feature (376)..(376): n = any nucleotide
  misc_feature (467)..(467): n = any nucleotide
gtatttaattaattacatgtttggtaaaaaaaggtttcttttttctctttgcttgcccatcttggcatttgtattccttgatagcccgtgagacgcctcccaagaacgagagccatgacgttgtcttcaggctcgtcggtgcgcgctctgaatgaatcaaaaagaagaaagaatgaagaaatgctgtacccatcttgtccaaccctgcgatggtttggtttcctaggaggaggaagccgccggagttgacatttcctgtatttgtatctgttgatccgacaagcgatgcagcttggcgaacacgcccactagcggcgcggtgttgtacgtgcatgcctccgtctgcatgtaattcccccgctgatctctgaacttntcccgggagtcagggccgccgacgagagcccccggtgatcacggttggggtttgggctttcgccgggccgtaccagtcgtagtagccctgnatgcaa

SEQ ID NO: 4775 - DNA, 625 bp, Musa acuminata
  misc_feature (2)..(2): n = any nucleotide
  misc_feature (6)..(6): n = any nucleotide
  misc_feature (8)..(8): n = any nucleotide
  misc_feature (323)..(323): n = any nucleotide
  misc_feature (328)..(328): n = any nucleotide
  misc_feature (341)..(341): n = any nucleotide
  misc_feature (359)..(359): n = any nucleotide
  misc_feature (366)..(366): n = any nucleotide
  misc_feature (533)..(533): n = any nucleotide
  misc_feature (544)..(544): n = any nucleotide
  misc_feature (566)..(566): n = any nucleotide
  misc_feature (570)..(570): n = any nucleotide
tnaganangttgaattgtaagataaaggtgtcataacatgactgagaattgacatccaaaactaacgagcagcaaaattagagaggcaatgatatagttcttaaaacagaaagaagctaaatttgctgcaaaaccaaacagaaaatgatatatagtcgtcctttcgaacagaaagctattgaatcatcatcatccaccagtgaccaattctaagaagattctgccatgggggctggcaagaaagcccttccaggtcggcgatcagcgactggaccatggcacccaagcaactttgcatttacaccatctgggatgattctgtnctcantcttccacttcanatagtcagcccggctaancttagtnaagccccactttccactgatgattatcttttgacggccaggaaacttgaacttggcacgacgtagggcttcttgagcattgttgctattactatccttgcagcgaacagagagaaggacctgaccaatgctcaccctagcacatgtcccttgaggctttccaaaagncccacgcattncagtctggagcctatcagctcngttnctgaaagcatcttgttgatacgtaagacatggacgggtgcactcttcacccgtag

SEQ ID NO: 4776 - DNA, 532 bp, Musa acuminata
  misc_feature (4)..(4): n = any nucleotide
  misc_feature (59)..(59): n = any nucleotide
  misc_feature (140)..(140): n = any nucleotide
caantgaacaggagaacgctgacttctgactgaattaatgtgtctctctatacccctanagtatttttggggcgaccaaaaactaccaaattattccacaaacccaaaataaatgtggctgtagtgtgattcaaaccccnattgggaagcattatattcatgcagatgtaagttggtgctgctggtactgagcttctgattgtttatgaacttatcttagagtatgtggatgacaaaatcttggttgttttttaatgttgttcttgtgaggtgttttgtggcataaacatttactatcttctagctgcttaaatttagttgagagagaaattagttagccttacaaccaaaagccttatctgtcggaagaattatgattacatgttacacatgttcattcattccagattgctaatcatcttgatcgtgctgttgctagcttgggaaggaagcctctgaaggttttggttcaagtaaatactagtggtgaagaatgtaagtctggaaaacaatgtattatttatcattgtgg

SEQ ID NO: 4777 - DNA, 612 bp, Musa acuminata
  misc_feature (2)..(2): n = any nucleotide
  misc_feature (7)..(7): n = any nucleotide
  misc_feature (98)..(98): n = any nucleotide
  misc_feature (581)..(581): n = any nucleotide
cnaccgngtaggatgatttatagattaatgttctgtcgaacattaatttattcatcaatagatgtattgacaagcaagacacacgaaaagtgttcganaacacaatgctcaacgtagatcatcaacttcttcagctggcatgtcctacagccttacataatctccacatctccatccaaacgctgcttttgtatctgaactcccatgtaccttcccagcatcatcacggtagcttggggattggttccaggggagaaagtgaaggtggagccgtcgatgactcggagagcatcgacgccgagaaccctgtagtcatggtctaccacctggccgacttggcacccgccatggtaatgccatatggtcaacgcgaggtccttgcagtactgctccaaggaggtggagtcatcgtcgtgcctcgttcggttgttgacgatcaagcttgcagatagggttatgagatcttccacggattgattggagttctgaactcggacatctcttttgtctcgatcactctctttatcgtctccatgccctccacgcacgtccggacgtctcgggttcacgaataattgaangtgacggcgggattgtcttctggatggagat

SEQ ID NO: 4778 - DNA, 596 bp, Musa acuminata
  misc_feature (22)..(22): n = any nucleotide
  misc_feature (118)..(139): n = any nucleotide
  misc_feature (366)..(366): n = any nucleotide
  misc_feature (521)..(521): n = any nucleotide
  misc_feature (523)..(523): n = any nucleotide
acagtctcccctatgcgttaanttcgtccagctcttttaggtttaagttactgctacttgagtacttatggggaatgccgatggcgtgttccccggcacggagtttgcgcgccgcgtnnnnnnnnnnnnnnnnnnnnnnttcctcgacaccttcaggaccaacctgaaggagaccttcttccccgatgaccccctccggcagttcaggaacgagcacggcccgcggagggttatactgggcttgaaatacttcttgcccatcctcgaatgggctccgagctacagtttcggcctcttcaagtctgacctcatcgcggggatcaccattgccagcctcgccatcccgcagggatcagctacgcgaantcgcgaatctgccaccgattcttggtctatattcgagctttgtgcccccgttggtgtatgcgatgatgggtagctcacgcgacctcgccgtagggacggtggccgtagttctcttttgatcgggtcatgttggggaacgaggtctcccctaccancngatccggcattgtacttgcacttggccttcactgcaactttcttcgtggtcttttaaggggcttggggttgtt

SEQ ID NO: 4779 - DNA, 600 bp, Musa acuminata
  misc_feature (2)..(2): n = any nucleotide
  misc_feature (8)..(9): n = any nucleotide
  misc_feature (13)..(13): n = any nucleotide
  misc_feature (15)..(16): n = any nucleotide
  misc_feature (20)..(20): n = any nucleotide
  misc_feature (22)..(22): n = any nucleotide
  misc_feature (35)..(35): n = any nucleotide
  misc_feature (62)..(63): n = any nucleotide
  misc_feature (65)..(65): n = any nucleotide
  misc_feature (71)..(71): n = any nucleotide
  misc_feature (76)..(76): n = any nucleotide
  misc_feature (81)..(81): n = any nucleotide
  misc_feature (85)..(86): n = any nucleotide
  misc_feature (88)..(88): n = any nucleotide
  misc_feature (142)..(142): n = any nucleotide
  misc_feature (214)..(214): n = any nucleotide
  misc_feature (230)..(230): n = any nucleotide
  misc_feature (386)..(386): n = any nucleotide
  misc_feature (582)..(583): n = any nucleotide
cncgaagnngaancnncgcnanattcatttctctnaaaagcaaatacatagtaatgatttcnntnccacgnaccanaacantggnncntcggcaaacgccgttattgtttaacatgttaattaattaggtggtgacgtccancgtagatcttaatcgagactcaaatctcgagttggcgttgcagctcccaaagggtgtcggcggaacgctganacgggcagcctcctcntcgctgagctggatattggcgacgctgaggacgccgctgcgaccgagctgggcaggaaggctgaggaagacctcgtggtcttccggaatgccgtagaatcccttggcgagcagagagacgggatggatgcgggtgctgatcgcgaagaagggatcnggcgaggctggccaccgagtaaccgatgggcccaagatgtgtagcctttgaggcggatcacctcgtacgcgctctccaccacggcttcctgatcctctctagcactcttgctccattgcagctttgtctttcgtgagctggctcagtatgggcactccccctacgctgatgctggaccacagtgccacgagctgtnncgtgctccctaccatgt

SEQ ID NO: 4780 - DNA, 553 bp, Musa acuminata
  misc_feature (488)..(488): n = any nucleotide
  misc_feature (520)..(520): n = any nucleotide
  misc_feature (545)..(545): n = any nucleotide
gcttgtataattaaacattacattatatagctagtcgttggcaatacagcatccctatacatcaggtgaataaataatacaccttggattccactgtgttcaatagcaaatctatggcagaaagctgatggaaattgaagcatccttggtacatgagcggccttggaacaaaatgctctcgaggagctcctctctcacatctcgatgtcctccaagtctggcaaggggaagcgcagtatagctgcaactcccgtcaactgtgccagttgttctacagatacatgcattgaagaaaaaatatgtacggtgccacctgaatccttgactgattcgacaaacttaacatacttttgcctcgtcgcaatgtcagaatttctaaaaaggccatctgtgatcagaagagtttggatggccatccgctcatgtgcaacctcaacatgctttggcccataacaagcgcgtgccgtatcatttgaaagcatagtgcngaagtctttcaaagcacggacctcctgcgcanttttttgtgtcttttatccaagacnttaacggt

SEQ ID NO: 4781 - DNA, 610 bp, Musa acuminata
  misc_feature (4)..(4): n = any nucleotide
  misc_feature (6)..(6): n = any nucleotide
tcanangttgggatagaacattatcaaaccatttagatctatcattacaatacttttgttaaagatatacaactacagtcaatacacaatggtgaaatatcaagttacgcttacaaagcaaaagaaaaaagagaggtgatggcataatgactatacatgatctcctgattcaaagtcgccatcgaaccgtaacaattagatccaagtagccagttgatttagcaatatctgcaatggaaccttcggagtaggccgtaagattgtggaagcaatgttatctgtctccttagtcacgaggccgagcaagccaaagagagctcagggcatgaagccgtgagaagtagtcattgatggcaagaagtgctcgtgcagcttgacgagtagttagtatccgacacatttgttgtagagtctgttgccgcaggttgtcagcctggcaaaggaaattttcgagagtcccaagtttccccatggccatagccatctgacccatgtagttcgcaacgttgcctgaagaccccgaggagctaagagacccagccaatgtttctgccaaagactgctgcagtgcctccatcccctgcgagagagcatcctcgggctgctgaga

SEQ ID NO: 4782 - DNA, 542 bp, Musa acuminata
gatatatacagcataccatgtattgatgacattacagtgcagaacccaaaaccgtaccaactatatctggccagtatttatcgccctatgcatcatccttgatgaccaagtgttcattagggtttcaaatgtctgatagagatgatgtgtgcgcacaacaaattgcacaaaatgttaacattgtaacgtcgaacaaaggtcatccagagcagcatacaaaggcagagcggctttcggttgctctacagtccccacaagtatgtcagtagtagtcagataaggatcaccatagaagcgtgtattagcatcctgacgggtcacaactaggtttccttcaagcgacactccgacaaaagcacctttgctacagctgtaagtataacacattcctgatcctttatctccagctcgaagatctgcttctaagactcttccaacaggtcctgctgcagcactcagtcctgccccaagggagaaatgcatacggctgcagaatgtcttcactgctttagaaccatgaagcactatgatgtagtcatcag

SEQ ID NO: 4783 - DNA, 440 bp, Musa acuminata
  misc_feature (24)..(24): n = any nucleotide
  misc_feature (30)..(30): n = any nucleotide
  misc_feature (51)..(51): n = any nucleotide
  misc_feature (54)..(54): n = any nucleotide
  misc_feature (56)..(57): n = any nucleotide
  misc_feature (65)..(65): n = any nucleotide
  misc_feature (100)..(100): n = any nucleotide
  misc_feature (105)..(105): n = any nucleotide
  misc_feature (164)..(164): n = any nucleotide
  misc_feature (167)..(167): n = any nucleotide
  misc_feature (177)..(177): n = any nucleotide
  misc_feature (183)..(183): n = any nucleotide
  misc_feature (189)..(189): n = any nucleotide
  misc_feature (192)..(192): n = any nucleotide
  misc_feature (379)..(379): n = any nucleotide
  misc_feature (393)..(393): n = any nucleotide
gaatcgtatagaacattacaggangctttncatgttatcagaatagaaganaantnngaaagaanagcctcttttcgtggaaaactacttaatctcatgntccanatcgagcttaatcggtccatgagagctccatcaccttggccgcgaactatagggggtcnggnagcttcatcnatcatnggcttnccncgtacggccagctccatgacctccctttcgctcgatgcgggcgatgatcgggttgctctgtggactggctgccgagacttgtgcagagaacatattgtatggttgcaagcaatttgagtgaatgcaaaggcacgacacgatcatcatggatcagcggtcaacagcatggtggattggtactgaagtngatggctatcaacntttctcccatggcctttttacattgtgtaaggtgagtacttaataag

SEQ ID NO: 4784 - DNA, 588 bp, Musa acuminata
  misc_feature (536)..(536): n = any nucleotide
caggacagtatgtcctacattggcatatggctcttacaaagttcagaagaatcacagaaactagttaggcacaagttatattaaagatgaaggcaccatatctgtacgaatacctaatgtttcttttgatgttgctgttatgactgactattgattaaggcctgatgccatctattacagtcgggttttcttctttacccagagcaactactgcttttttaagaagagcttcagttggcaaatgggagttctccactgccttggagattgcttgccatttttctccatgctttggttcagcagccatgcatcttttcaggacatccttttgagtttcttcagtaccatgctgaagttcaaacttgtagtataaggcccagaaatctccaacatcaggagcaagtgtaactgccctgttgaaccagttccttgccttatcaaccttcctatcttgccaaaacagttttgccacagctgaaatgacatatggatcatgatcgcagcgcttaagagcatcccgactctttgtcttgcgntgaggacgtggaaccatctcaatggattccgcccatagtatcccacttgttg

SEQ ID NO: 4785 - DNA, 467 bp, Musa acuminata
gtgttgctggtgtgctggatgggcatcaccaggttgggaggggcctgcccttgcaagctcgaagccattgtggccatcaggggttggctaagcttgttgttctcatgcgccaacgcgttgcagaaggctcggtgcgtcatgaagctgtctctcctggagaagatggtgccacagtcgcatttgtactgcctcgtcccgcagatcttggagtgagccttccaatctgactgcacggcgtatttcttcgagcacttgtcgcacttccacttcttctcgccatgcttgcggcagtagtgcttcttgattccggtaagatcgccgagggcgcggctggggttgtggtgcacgcatgtgggctccggacacacgtagaccttcttcctggcctcgctgccgccgtttcgtggcctcagcttccacggaaggttgtggcctcggcggtgcagttgcaggttttggtccctctg

SEQ ID NO: 4786 - DNA, 466 bp, Musa acuminata
catgtcttcttggctgcctgcattttaaatacaacatagaatcgaaggggggacaagagaacagaacactacttagagcagggatgtctgatacttcatcacatatatgtatgtatctgtttcttgtaattgatcatccagagtagactgctgcccgtttctacacttttgatccagtcgacacttcatcccctgtggccggaggagcggtaattggctcgaggcatctggcccttctcgatgaggataatgtccgccaccagcagctcgtagtgccgcttcacttcttccgctgacttgccgccgacggcgcgcgccacgttgtgccagcggtcgggcgtgtccttgtcgtacaccgcgagggctttctcgaacatcttgttctgcttcgcggtccagcacgagctccccgagctggttgccatctcgaagctctgatgtgggtgagagaagctgacgagtcggc

SEQ ID NO: 4787 - DNA, 700 bp, Musa acuminata
tttctaccagtggcttttcagcactgtgaacagtcatacaagaagacattagtgaagaagagacgactggaagaatttgatgaaacagagtaagctctaaagaataatggtacactgagttggattgctcttagtgcaatacaaagatcaacaatgaaggttgcaatatctcagacaaaggtatcagtctgtgaagagataccgcaatattagcaaactgtggactccacttgaacttctaaaagaaatatcttaacaattccttcctagaggaaaatctaaaaagtacaagcaggcttaataagatccacaactatccagcagaaggtgtggcataatgcccagttttccttctgtggcggctgaaatcagatacaaacctgaatgtctgcccgcacccagagaacttgcacttgtagggacgctctcccgtgtggaccctgacatgttcggtcctggcccatgcccacttgaaggtcatgttgcagcccttccatgggcatctaagaggtctatcatcattgtgaacacactgatggcgcactgcatatttgtgacagctaaatcgctttccacatccctcaattgtacaacggtcacgcttgtgcagtgaaagttctccccttgtctgaaaacttcataaaacagcttcaatgtcacacttgaaagccttgctcttatcttcctttgcacaatcgag

SEQ ID NO: 4788 - DNA, 529 bp, Musa acuminata
  misc_feature (3)..(3): n = any nucleotide
acntaatgaaagttaaaatatatgaccaaagtcaccttccttcaagtacacatcaaaaggagtctgttgtactagtgaggccatccttgtcatgaaagctttcaggcctccaacaaaaaagggaggaaaaaagagagagaaactatacaaccgagttaaggaatacatttccaactccaaaccccatttaataattatttatcatctctcacgtgtttgcaaccgccaacacccaacttacaaattctggatttggcatacacccgactgccatcagcaaaaatgctgcatccgctacaccggtatgacatcgagctttgaagtatcttcacacctcaacacaatcccatcaagattagctgggaggatacaactggtccattggcatcctgtcgaaattggctcagatggaggaacaatcataagcacattgtcattcttccgaacgactcccatcacactcacagtactgccttccttgatatacccttctttcatgcgcattacacgatcatcacttgaaagattc

SEQ ID NO: 4789 - DNA, 820 bp, Musa acuminata
  misc_feature (811)..(813): n = any nucleotide
  misc_feature (817)..(817): n = any nucleotide
ttatcatgataaatttgcatggacttgacttcttacatgttagcttagtgataacgtacaactaagtgatgcttgcatagcacttgaacaacaatactctctaacgacagtgctctaattttgtttaaagcctcgtatcaggcaactctgcttctgctggtccgccttcatccgccacttcgataggtggcatgactctcttccagaaccagtgcttcctccacagcagtatcatctcctcgataggcacccctttggtctccgggaggaagacgtagacgaagacggtcattatggtgatccaaccggcgaagaagaggaagatgccgaacttgaaggagcagaggaggctgaggaaggactgggcgatggcgaaggtgaagaggaggttcaccgacaccgtgatgctctgcccggccgacctcgtctccagcgggaatatctcgctcgggaccgtccaccccagcggcccccacgaccacccgaaggcggcaacgaagaggcagaacaccacgacgacgacgatggagaagtctttcgacagctgcttgtcgccgccgaacttgacgcctagtatgacggccactgcaacctgacacacgatcatctgtaatccgccgccgatcagcagcggtcttctcccccacctgtcgacggtggcgatggaaacaagcgtggaagaggcgagcacggagcagagttgcctgatacgaggctttaatcaaaattagagcactgtcgttagagagtattgttgctaccgatgcactgttcgagtgctatgcaagcatcatttagttgtacgttatcnnnaagntaa

SEQ ID NO: 4790 - DNA, 459 bp, Musa acuminata
  misc_feature (280)..(280): n = any nucleotide
gctttaaaagattgattttagagtctcgtaggtcatgaaaacaatgcccacactggggacaactttgaggtattcaggcaagatacctcggtataagcctcgaaatccttcggtcctaattatatgcttaaacgtcccaaagacgcctgacttatagacacaagcccttccagctgccccttccaactgcattcttcgcctcacgagatccaacgggaatgtcactgttgatgatgaaataccagaaagacttccacaagccaaactaaccaatacaggngaatcatatggcctctcaacttgccaacgagatctcaaagtttcatacacagaaaagctggttgctaatgctgggtccaacacccatcaatgttggtccaagtcccttgtataatcctctcctaacctcatctctgcagatagcatacacagcatgtgaaatgcccctgtaatacatag

SEQ ID NO: 4791 - DNA, 615 bp, Musa acuminata
  misc_feature (2)..(2): n = any nucleotide
  misc_feature (478)..(478): n = any nucleotide
  misc_feature (573)..(573): n = any nucleotide
tnatttgccttttattggtcgaatagattacgacagtccttaccaggaaacacttattcttctgcctcacggccaagtagggaaaagcctcgtgacctcattcataccgaagtcttacaacacaggtgagaaacgtgaacgaaagagaagcgaatagtctcttccatgattcatcatcatcagtcttcatctcttctcccacacgcagtagtcgttgccagaggcaacgacgtggaagttggaaggaacgagattccccacgtcgtatctcgagcctagctttgtcagtatcttcccatcgatcattgccatgtagaggtcagcatcggaggccagaatgttgagagcgctacccgaatgaattccatttcgtgttctggtttcagccaactgtgttatcgcctccttcaatccccagtcgaacatgtggtcgtagaagatggaagggacgcccggatgtgtgagtatataagcgtancttgcatgaccttatcagaaggaaaaggccacaacctttgcgtcgaaccggtatcgtggttgtcgacgaaagtgacagccttctccggccaccancccatcatgccggggcgccttcccctgggaatcacgcatcct

SEQ ID NO: 4792 - DNA, 695 bp, Musa acuminata
  misc_feature (679)..(679): n = any nucleotide
aatgttacagaagagaggtctctcaacgtagtagtttacacaaacaggtacaaataacaaccagattttgcaacaaaacgcccaaaatagaccacaagctcgttattcctcacgctcattgcaagttcaggtagattcaagggtttaacaccaacgacacgactggcagaaatagactccataaagtccatccaaggatttaacaccaaagacacgaccggcagaaaaggatcgcggctccatggccatgttcaaaagccctgatcaaagagatagtcgccaagcctctccactaccatattgcattgaccaggcgtcatgggctcattatatatgccaatgatcaaagccagattggttttcttgatggtgacaccgccagaacccttcttccctcgaataacagctcctgattccccttggatgaccatgtacttcgtcccaccaaggtataaaccagttggagcaagagacccaggttcaccgaagtctttcataattgcagcaatctcttcaggcttgcactgagggaaggcgtcgctctgggcccagacgctgccatcgtggccgacgatgggcggcggccgtgagacactggccatcgatgtcgcacaacaaatggtcgtcaacgtacgtctgccaagacatcgtccttccccttcttctccggcgctcgccnagctccaacgcgtggg

SEQ ID NO: 4793 - DNA, 636 bp, Musa acuminata
  misc_feature (16)..(16): n = any nucleotide
cactcttattatttantctttaaaggcaatagtaaactatacactttcctctgtttacactacatggaattctggttgctcgaaaatggcgagcaatgagcagctgaaccacaagaacccaaattctcgaaaaaaagaacaagaaatgcaaacaaagttaacacaacatttcaaagagaagagcatgtttgccttttgaactgctagttagtcgatcatttgatcaatggcgacttggccgaaaatatcagggcatccatcccacttgccttcttccctggcttcccagtaaccaccgatataccaatacatgtcacttcctttatcttttgcaaaccatcgaggtttccagcctctttcctgcatctttcttgcctgacgttgtcgctgttcaagtctcaacttctcagaatttgccatttcaaactccccgttctccaagcacctctgatcaggccttagtcttgaatctgttggtggcaatttttcctttaatccaggagtgagttcattgattgtcattgcaaaacgagtgagattgtatctggtaggatatttaggtggtttgctacgtttccacagtatgtgggcttcagaaaacgggtcagatccttccctttccagagcaatctccat

SEQ ID NO: 4794 - DNA, 623 bp, Musa acuminata
tatatataattggcagggtatacaaaatatacaacgtttttaataggttgaggatataaactggacaaaacctatttgaagatgatatcggttgatttttttgttcctttcacggccatgcattcatcaaccgttgtgttcgtaaaggtgtgtagagtcctctgtcatgtatgccctttttggtcatactggaaattttagagatagttcatgacttcaaacaagtcattttggttgcttataacccttgctttatcatccacaatttccaaaacctctggtcttgaattaagaactccactagacatgcccacatcaatacaccatattctttcattatatttgctgttaacaccattaaattgtggagtatggccaaccaccattccctttgctcctacagcttgcaatgtttcttccagaatagaggatatctgcaaaatttggtacttagcatctgctgaatctcttgaatacagacgattccaaacaatactatcataacctctggtagctatgaaaggaactgccggactatcactactttcactaaagtctctcatccaaaatgatacttctttgttcatcctctccaaaccatatgcaacatgatgagggagaag

SEQ ID NO: 4795 - DNA, 656 bp, Musa acuminata
  misc_feature (634)..(634): n = any nucleotide
tatatcaagcttttgagcagaagattgttaagatgtaatttaaaaagggctatgcacgattctaagacaaccttaagaagcagcaataggcaacataatgtacataaaacataggcaataattacacgaagaaactaggcttgcaacagttgcctggcttgaaagatattcccaagttgctcatatagaaactgttgctcctcaaaggtaaggttccttaatatctgctccaaaatcatctcaactgacaaactttgaggcatgacaaatgattgatggtatatgtatgcaaaaacggccatgaccatttggcaatccattctgtcagtaattccaccatgtccaggaatgctgtcaccgaagtccttaagtttgaaggcacgtttaaaaccacttgcaaagaatcctccaaatggtgctatgattgatgcaaacagaccaagagctaaagcatgccactgcacaggcaaaattgctacttctttccaaggaaaccactgatgcatgcatctaggtactgaaaaatattctggtttaaacaacgtgccaggatcacaatgcagccatccggttgataagtcctttctggacatgtaagccttggaactggccattatatttgctaacatgaggngagtcatgtcgtgttgtgccca

SEQ ID NO: 4796 - DNA, 645 bp, Musa acuminata
tacagttgcttatattaccttcagaatcttcatgctgaacaccgctgctgatttgctgaaacagttccagcaaagtcgagacttccttggcaaatcatgtacatattgttctgtagcactgtggccatcttcaagatctgaagaacaagatgaccgcagagcactcccaacattagaaatcattcgagcaatagctcattgcaaagctgctggtgagctgcggacatggccctgggttgactccgagcgcagccccagtgacgtccgtgcacttccacggcgaggccccgacgccccagagcttgacgttggagaggcatacccgagtgaaaggcgagttcttgatgccctcgatggatcccggctgctcaacctcctcaccccacacgttcttgatcgtcactccatcaaccgtcgggactgcgttgggatcaaagttctcgtcggggtggtcaccgacgtcgccggcgatcctgatggccttccgaacgttgttcatgttgacgtcgctgatggttatgtttctgatgtagcctcccctgccgacgttggtcttgatgtggattccaatgccaacgtcgtagaggttgatgttctccaccaatacgttctccaccccgcctgaggtctcgttccgatgggatg

SEQ ID NO: 4797 - DNA, 584 bp, Musa acuminata
  misc_feature (39)..(39): n = any nucleotide
  misc_feature (74)..(74): n = any nucleotide
  misc_feature (77)..(78): n = any nucleotide
  misc_feature (80)..(80): n = any nucleotide
  misc_feature (84)..(84): n = any nucleotide
  misc_feature (86)..(88): n = any nucleotide
  misc_feature (91)..(91): n = any nucleotide
  misc_feature (94)..(94): n = any nucleotide
  misc_feature (162)..(162): n = any nucleotide
  misc_feature (549)..(549): n = any nucleotide
ataagtaatcagcaatcggtccgtctacaccgatgacantttttcactgatatcgtttcaactatttcctaccngtnntntctngnnngtnaantgagttcagtttcagcagcacggcgtttgatcaaagcacaaaagcagttgaaaggtatgaccttgttnactttctggtcgtgctgccggaaaactatctccaagataaaaacagctgctcgaaatgaaatcgaatcagatccagcggtcgagccacactcttgcttgggaagaggtaatctttcttttcacaaacgtagtctaagaactccataaacaaacagatctgatcatgtcaagttagcgactttgtaaccctctgtgcataagctactaaatgcaaactggaaagtagccaggattttatcctatcatcacctagtgttcaagtccagctccccagcttctcgccattcaccttgttctccggtgtctccattctcaggttcattctcatcattcaaaaaatcctctgatggctcttcatcctctctttgagatttccccacccatgantttcgtccatgttacctgctgttcttgccccatat

SEQ ID NO: 4798 - DNA, 530 bp, Musa acuminata
  misc_feature (473)..(473): n = any nucleotide
ttaacaatgaacctaaagataataaatgcttatgccaataccatatgcctactacagttgagggctaaaagaaactcactgcagatgacagacaatgagccaccgcatatgctacagttgaaccaaccaataacaaatctcaccaaaggaaggcaaaaaacatgagctcatctaaaatccaccctatgggtagggtttggatcacaaggttgtcgacactgaatccttactacgctccatcagccagtctatctagaaagctctgcaactccctaagcccctctcctgatatactcctccgaactcgaggccgcggagcagtcatgaccggcggcggcttggtttggaagcacaccaaaaccacagcgagattgtcgctgctctccctcttcagcgcttcgtcgacgagctccttacagcatgtggtcggatcgttgtgctcttggagctttcggcggcgccaagtccacggngttctggctacggaagacatcccaggaaggccatcacatcccaggatcagaaactcg

SEQ ID NO: 4799 - DNA, 628 bp, Musa acuminata
  misc_feature (4)..(4): n = any nucleotide
  misc_feature (621)..(621): n = any nucleotide
aaanataagaaagagataatgttgttgttacaccccaagacatagttttcacacaacccacacaatggaagggttggcagtaccagcgtgccaacatacagaatgatgatcacagaactaaaagaatggaatagttactttagttaatgatacatgcattgagtcacttatgatttccgcacaaaatcttgctcctgacagttgatgacatgtgacttaaacacggagacaaaagatgcaggatgtcatataatttgacaagccctgaaagcttagtggccggcaggatttctattccatgacaagtatgaaggatcaccaagcttcctaggttttaccaaatacacgatagtgaaggccacagctaaaaagaagcataaccctccaacagccagataagcaatgccaagaaagtcattttttccaccaagccaacttgatgtggaaagcaccaatttcttcttgccactgaaactgtatgtgttgtaattgttctctaatgtaacagtaatgacatcacccgcattcagatcctgctcaatcttcccatacaatttcctaaatgttggaagagcagcagtgcgcatccagacaatgaggtcttcctgctcacttaaaggntttgtag

SEQ ID NO: 4800 - DNA, 574 bp, Musa acuminata
attttcacgattgtcacttccaaagatcaggtttctaaggcaaactcagatctacacaggtaggaaagaaaggcatggatcaacacatgaagagttaaagagaggaaataccacgacacgagagagaaacaagaaacatatccgagatcgacgatgccacgaaccgaacgatttcaaggatttagggttccacggtgatgacgagggagtcgactggatcagagggaggaaggtttgggattctcctcgtcgtggagcacgggctttgtgagcatgagcgggcggtcgttggcctcctcgaggtcgtcgccgtcgtcctcggtggtgctgaggttgatgcaggagcagcgctcgagggaggcgaagaaggcggacaccacgctcgctcctacccacatcgccaccccttccagcttcccgtagtcgacaccatgctctgggagtcatcctccgtcgccatctgagccgcccgctcccggatctcacgacgccgggtttcgtctcctgcttcggttcgtgacgtgtaaggagcaatcggaagagaagccaaaaagaaagcctcagagtcagagaa

SEQ ID NO: 4801 - DNA, 538 bp, Musa acuminata
  misc_feature (127)..(127): n = any nucleotide
  misc_feature (151)..(151): n = any nucleotide
  misc_feature (207)..(207): n = any nucleotide
  misc_feature (209)..(209): n = any nucleotide
  misc_feature (481)..(481): n = any nucleotide
  misc_feature (494)..(494): n = any nucleotide
tgagaccgaaaagcacaaacattccaagaacaagaaggatgtctagttattctgccttgttgcagcacaagaaagccatggaatgggatactcttacttagttctagcgaggttaacctttagccanggaactcttccatgaaagcttcanggaacgccttgagccgggatatgatggcggggatttggtcctcctgcggcaggatngngcatctgacatgccatgttccaggaacctgcccaaagccggatccaggaacgacgacgatgccggtggcgtcgagaagacgtcgagcgtagaatgcatctggtgctgcattaactgctttggcagctgcgatagccttctgcggtaggcgcaggcgaggaaagagatacattgcgccctctgctttgttgcagctcacgccctctaagctgttgaatgcatcttccaatgccttggcacgtctagctagagacgaaagaatcccatttttcnccgcattgaaagnttcatatgattcgtctccgacctttgtggattcataacaagact

SEQ ID NO: 4802 - DNA, 769 bp, Musa acuminata
  misc_feature (627)..(627): n = any nucleotide
  misc_feature (643)..(643): n = any nucleotide
atgtcattatctagtataaagttttgctagaggacaccagagtgtaattacataatgtttttatgctttaatgggctggattatgccaccaatgtgagataacaaggaaactgcttccatgatttctttgccaacttgatcttaaaacatcacttgattcttgctgcgctatttttgacttgtgtacaaggatagttttacacaacaatgggaccgacatgtagattatacaatgtgtggtgtttagtgcaaatcacatgcccattgctccggatgtgagctcagagtctccttccagctcgccctccgaaacttcgacgatgacatcacttctcttgttctcagaaaggtagtgatccaacgcgtcgtccccatgtaaaattttggctccacatcctggtttgtcaactgacccaacagcttcctcatccaccacaactgcatcaattcgctcatctccagttttcacatcaggaatctcaaacatggcctcgataagtatattctccaaaatggctcttaaacctcgtgcaccagtgttcttggccattgctttctttgcaatcaacctaagagctgcgtctgtgaaatgcagcttaacattattcatgctaaacaatttcttgnactgacgaccaagagnttctttggctctgtcaacacctgaacaagttggtcctcgcttagagctgacaaactaactagtatcgggaaacgcccaacaaattctggataagacatatgctatagatcactgctctcgacagat

SEQ ID NO: 4803 - DNA, 570 bp, Musa acuminata
  misc_feature (14)..(14): n = any nucleotide
  misc_feature (81)..(81): n = any nucleotide
  misc_feature (103)..(103): n = any nucleotide
  misc_feature (560)..(560): n = any nucleotide
tcttcagtgcattnctgccccttgtttcaggtcagtgtagtacatatatatacacaaaaaaatgcacagaagatgggtgtntagctgtccattcttttttacngttcttgttcatcccgaagaatgtgtttcattcagtttgcaaacacaactcaaatttagcagagaatagcttaatttgcagatttcacaggatgccaagccgcaaatggctacagcaaaacttgcttgaacaaaaagaaactgtgctgcctcttacaatttctggtatcagatttttccatgtacctcttgcttccttctcagcaaattagcgccttttggcgttgatggtgaactcttaaagcttctagaatgctgtcaacccacccttcaagaccagggtttttcgggtagtatacattcttcaagcccaatcttttggcagctaaaccagttgtttcgccgatgcaagcaactgagttgtcccaattctctggttcccggataagcttaacccaagcacgggctgcagaaggggaagccactgcaacaactggagtagaaagagcaaattccanaatagtttca

SEQ ID NO: 4804 - DNA, 548 bp, Musa acuminata
aactacaagcataagtaaattaacattgtcatttcagtcacttgaaccaaattcgctagagaacatatactagaactaccatttgagagtgataccaaaaagatacagcatcaagctgtatgccatgttcccttgagacctagaattaccattttcagtgaaaccagaaagacacagcattgagacatcaacaaaaacaaactagaagagagaagtccccttcccctttttgtctccaccaatctcgaagtgcttgcatctttttatgggatgctgcgaataatgcttgcaactttggcattgaagcttcaacacaatcttcttggtggtttttgccttcttgtgaaaaacaggcttcgtctgtccaccataacctgattgcttcctgtcatagcgtcgcttcccttgaacagaaaggctgtcctttcccttcttatactgtgtaaccttgtgaagagtgtgcttcctgcaagccttgttcttgcagtatgttttctttgtcttgggaacgttcaccatgactgcagcgcttggttggtgtttccgcc

SEQ ID NO: 4805 - DNA, 509 bp, Musa acuminata
  misc_feature (7)..(7): n = any nucleotide
  misc_feature (491)..(491): n = any nucleotide
aaatttnagaatctatcaagattgatatacattcaattaaattcaaggtttgagaaaacctcatagtcagttttcccatctacaaagctatcgatgttctgcattccttctaataaagatggttgaaatccatcaattctggaagggagcattttatagcataataacaacccaagaatgaaaatagcctgcagctttgtagagtccccctgaacagtgaagaatagtaacatcgacagaagaaacaagaccacacagaaatgcataatacacaataccctgtccatcagcttcccatcattaccagctggaaagcctcgagctctgtacacaaacaagaagttgtacttgtccaccacatagcggtaaccaaagtagacagcaccaacaggaaccacaagcggggcaaacaaagaatagatcatggtcagcgcaaagattgtcaggttgaaagcatagtactgtggcaaagtcaaatgtctgctttgggncatggaagctcctattca

SEQ ID NO: 4806 - DNA, 589 bp, Musa acuminata
tgaataatgatttcttaatagggaaatataatgcctgaaaatttggaaaatattgccctcaccatcatctaataatggcagccgaatgacaataaccagtttggaaacacaaaacagcataagggatagacattattatcattctgaaaaataaaaggtaggatcgatgactggcatagtttgctgcggcaaaaccaccagggaggttcacttaaaatcaggcttctctgggtaagtgcagcctgacctctgaattatcacatttgcggcataacaaccggctcttacgcagtcctcgatgctcttttcttgaaccaactgggacaagaatcctccaacaaatgcatcacctgcaccattggtatcaaccagcttctcctttggcaataggatcactgggaacaatctcacctttccatcctcagcgacaactactggatcacaaccttgagtgataacagtaattcttttgtgagttcctgatgcctttggcaatgctgagatctttaaagcaatctcctcaacattctcagtctcccaaccgcgaactcttgcaaaggtccttgcttcagtttcattcccaaataca

SEQ ID NO: 4807 - DNA, 624 bp, Musa acuminata
  misc_feature (581)..(581): n = any nucleotide
tattgcaacagaacactggcattccaggcttacacaacactctgaaaacatcaaaagacgatcttttttgcatttttgattttgctaagcagcagctcatgttaattgagacgaaaactcgcgatgaaagcctctcccttgtagtcctctgattcgtaaacagacagatcaactcagcgatgacagtgacgacgcttcccactcagttctacttggcgccattaactgcagcttctccttcaactgccagtggtacagacacagccaaattgcggtatttgagggcgtagaacatctcgaggtaacgacgagtctcacgccggtccaggttcgatacgtacttccagaaaccataaactccagtcagtgtcatcagcctctcagagtagagcttccaggtgtacttctcttcgattatttgcagccctcctagggaaattttgtcccagtggctcgggtcttccttgcacttatcaaagaagtttgtgacgatttcggcagctttgtcgccctggtaaggatcgatgtggtaaccagacaccccatccactataatttcaccaggtcctccatgaacagtngcaaatgtcggcagtccgcaagtcatggattcgacgacagtga

SEQ ID NO: 4808 - DNA, 501 bp, Musa acuminata
  misc_feature (31)..(31): n = any nucleotide
  misc_feature (41)..(41): n = any nucleotide
  misc_feature (65)..(65): n = any nucleotide
  misc_feature (126)..(126): n = any nucleotide
  misc_feature (146)..(146): n = any nucleotide
  misc_feature (148)..(148): n = any nucleotide
  misc_feature (161)..(161): n = any nucleotide
  misc_feature (174)..(174): n = any nucleotide
  misc_feature (178)..(178): n = any nucleotide
  misc_feature (189)..(189): n = any nucleotide
  misc_feature (192)..(192): n = any nucleotide
  misc_feature (196)..(196): n = any nucleotide
  misc_feature (288)..(288): n = any nucleotide
  misc_feature (365)..(365): n = any nucleotide
  misc_feature (378)..(378): n = any nucleotide
  misc_feature (411)..(411): n = any nucleotide
  misc_feature (440)..(440): n = any nucleotide
  misc_feature (484)..(484): n = any nucleotide
tttgatttcatatgctcatggttagaactgnaagtgagaanagccatgacggcgagctgagacgnaagcaataaacaaaatatagcagtaattaatcgagtaggaactgcatgaaggacatgaatncttttcatagtggtcggttngntgtctatagacgncgccaactcgagncagncctcaaagacnaantgtncattaaaagatagccagtgttatctttagtcctacgagagcttggatagatcacactgcgtgaaacatgtgtaagtaagtcgatctttcccngggttgtatatctcagctcacggacggaagaggctccttataatctcggcctgtgcgctgtccatgtccatggtcgncatcatctccganaggcggtcgctaaggtcgtcgacctcccggtgnaggctcttgatgtagttgcatgtcctctntcagtagcttcgcagatgaagctctgctcgtgccttcgccggcngggccctccggggagaa

SEQ ID NO: 4809 - DNA, 744 bp, Musa acuminata
  misc_feature (630)..(630): n = any nucleotide
attatagtggcctatcatgaagtggctctgtacagatacttaaagcatacatacacagaaacattatagtgtgtgaacccaccatatcggatcggtatacaatgtttcatctctatcaagtcaatcttcggtggcatatactaacagtcagaccttgttgatcctgtacaaggatgctggggaatgtggctgaaaataatcaaaatattcatggtctcctgctgtacataacaatctacatcggcaaccgaaaatctagcccagcgatgaagtggttggtccgcatcattgtgaaaacaaaatcatatagtaagattctcttgaatggcaaaaaatgacccacagattttgccaccaatgtctgggaatgtctcgtgtccaggaagaggtttcaccttgcctttcctattgacatccactggatactttagtaggtggccccttatttcagtaatctcattggccacgtattggctccagttaaactgaccgatgtcacaactcgcctcatgcattcaaggctctccggatggttaaaacattcctctatagttccaatgtgctctgcccacagcgacattctataaccaaaaatctgtccacgaggactagagagccttcttgcctgtntatgctgaggttggtacgcacccattgcaatctcagtgtccctggtaccttccaaggacctctggttgatgtttgctgatcccagtatcacatactcatcatccactatcatac

SEQ ID NO: 4810 - DNA, 567 bp, Musa acuminata
  misc_feature (2)..(2): n = any nucleotide
  misc_feature (11)..(11): n = any nucleotide
anctcaaagcnttaaaaagacttgaaagctctggaaaataaagatcattactagtaaattaaaaatgttgaaaatgagggacgttggtctcagttatattctctgctgtaactactttgtccagtgggctcttgcaatgtttctgcagttcaatatatctctgaatgtcaaaactatgcttctgaaatagtttcttttgtcttgacaagaacagcctcttcataaagtcttggtatgtcggatctctcgatgtaaaaaggaagtaggcatatccacaaagaatgccagctgtagtggcgaagaaggctattggctccatgacatcccatgagaactcccagaatgtaagccgaaagaagagaccaatctgaacgattaggaatcccaaccctaaccaaagtatgcgacggacttgcttgtgagcaagcatatcgatttcttgtttcttctcctgcagctgcttcaactcttctctccttgggtcattctcagggtgtcaaagaaagagggacagcccttcttataagatccacaaccttttccgggtggagatataccttatcccta

SEQ ID NO: 4811 - DNA, 442 bp, Musa acuminata
  misc_feature (26)..(26): n = any nucleotide
  misc_feature (136)..(136): n = any nucleotide
  misc_feature (140)..(140): n = any nucleotide
  misc_feature (178)..(178): n = any nucleotide
  misc_feature (187)..(187): n = any nucleotide
  misc_feature (194)..(194): n = any nucleotide
  misc_feature (198)..(198): n = any nucleotide
  misc_feature (204)..(204): n = any nucleotide
  misc_feature (429)..(429): n = any nucleotide
gtgtgtaatcggtctgttttcttcantgttaatttgccatggtatgcaaacaatagcttatacaaacattgcttacattttcaaaatcatacagcaccacaaatggagctgcggtgatcgaaaaacaacttaaaantacnttttcttcttgtgataaagcacataatggaaactcacntactcgttnttctacngttntttgcnatatggtggtaagcctaggttttctgtaccttcggagaagcaaagaagagcaaacgacgctgacagatgagaaggccatgcaagcgccggccaaccatggtggcatccttagccctgcgaggggaaagaggacaccagctgcgacaggtattgccacgatgttgtatgccattgcgaagaagtagttccaacgtatccgggcaaaggtcttcctcgagagatcgntagccgtaatcac

SEQ ID NO: 4812 - DNA, 647 bp, Musa acuminata
  misc_feature (93)..(117): n = any nucleotide
tttcatctatcagcatgagatctatagaaggaacaacaccatattatagacattaatgtgccttttccatccatgaacttctcagtttcatgnnnnnnnnnnnnnnnnnnnnnnnnnaagaaagcaagggtgaagcatccaacagtagtagtagtgtaccctctgatttaggttgaaactcctgcttaaaagggagccacattaagatacaggacactattattccggtggaacttcacttctgcagacaaaagatcacaaaggaaaatgaaggacaagaccagctgaacgccaacttcaaacaccataatgcaacaaattagtgcctgtacatcagcgatagacatcatccttgaagcaccttttgaggatctagttgcccactgcagtaactggaaggaacagcagaaagctctatccttcccttccattcctcaccaggcttcagaatgatgggcttctcaatggctgcagcttctacggatagcatatgcttgtaatcatcatctccaaaatctggcatggctttagccttcctgtcccaaggattccacaccacagcatctggaagtccatctttgcgcaaaacaaaagttcgtttcttttcatgatctataattgcatcttggttggtgtgctcaaatata

SEQ ID NO: 4813 - DNA, 538 bp, Musa acuminata
  misc_feature (13)..(13): n = any nucleotide
  misc_feature (17)..(17): n = any nucleotide
  misc_feature (21)..(21): n = any nucleotide
  misc_feature (27)..(27): n = any nucleotide
  misc_feature (30)..(30): n = any nucleotide
  misc_feature (47)..(48): n = any nucleotide
  misc_feature (56)..(56): n = any nucleotide
  misc_feature (65)..(65): n = any nucleotide
  misc_feature (79)..(79): n = any nucleotide
  misc_feature (96)..(96): n = any nucleotide
  misc_feature (123)..(123): n = any nucleotide
  misc_feature (130)..(130): n = any nucleotide
  misc_feature (136)..(136): n = any nucleotide
  misc_feature (150)..(150): n = any nucleotide
  misc_feature (168)..(168): n = any nucleotide
  misc_feature (195)..(195): n = any nucleotide
  misc_feature (290)..(290): n = any nucleotide
  misc_feature (366)..(366): n = any nucleotide
  misc_feature (429)..(429): n = any nucleotide
cttcggttaattncaanattnaatcantcnacaaactgatattaatnnaacagggncagattcgntggttacattaacnatgatgaaactagtaanattaccattgaattccgatccatatanatgaccnattttngttctttttgtctncaagtatcttatattctnctttgtgattggagtagcaagggaacntaccgacgatgctcaatccatagcctttcagtccaccatacttggcaggattgttagtcatcagtttcattgttcgaacacctaggtctcgtaanatctgtgcgcctatgccatattctcgtgaatctacaggcaatccgagctcctcattagcttccactgtgtcgcgcncgtcatcctgtaggttgtaagcacgaagcttgtgaccaagaccaatgccccttccttcatgtncacgaaggtaaaccaacacacctctgccagcattttcaatcatttccatagccaatgaaagttgactgccacagtcacatctagaagatccagatatgtcgccagtgag

SEQ ID NO: 4814 - DNA, 632 bp, Musa acuminata
  misc_feature (411)..(411): n = any nucleotide
atagtagaaggatgagaagagtgcggtagtgaagtctcaaggaaactttctccagtggggataaaaagaaaataaattccagagattgcaaatgctgcccacccgatatttgtgaaattgatataaattaaaatgtgtttcatggttcataattccatacagcagagcctcacatcggaagaatcaacgggttactctgtaggccttgacactttttaggaggtctttagccacgctgttgttcttgaaatgatcacgtacaggctgcaatataagatttagtgcttttgaaagagcaggcttcagatcagctggatgtaatactccactctcatagtccaatattagttcttccatgttgttgtatgtcttgtttccaccattttcctctttccgcacaacttcaaaatngccaaaccatggaaaaacaatgtatttaatgtactccaggcatgggttcccttccacaacctttggtgggcagtaagccttctttatcttcacattcacttcaccctcctcatcttccatgtaaatggaagaagatggatcactttttgacatcttctcctggccctcctgtaaaaccaggaagcatatgatgtgacaaaatgatggggcttatttttttt

SEQ ID NO: 4815 - DNA, 622 bp, Musa acuminata
  misc_feature (5)..(5): n = any nucleotide
  misc_feature (18)..(18): n = any nucleotide
  misc_feature (396)..(396): n = any nucleotide
  misc_feature (479)..(479): n = any nucleotide
  misc_feature (516)..(516): n = any nucleotide
  misc_feature (536)..(536): n = any nucleotide
  misc_feature (542)..(542): n = any nucleotide
  misc_feature (610)..(610): n = any nucleotide
ctcgnaactctccttttngataaagagttaatgataacaagatcaaatcaaaattattgcgccagttactcacatagtttgaatgattatggtgataaacgtgaataacactttacatggcataaagtacaaaattgaggtcaggatccagtctttcaattgaacgtgtaatagtttagtgtggtttggtacaaatccatcaacggcaaagtttcgggtggctgctggtagtgccaatcgaattccatcaagttcaggctttgcaactatttggcaaccaaggcgagacgtctcagttaggccaaaagcaaggtccagcatatcattttcttcatccgtcggatcttctaatttgttgtagtagttgacatccatcaccatcacatgacatgtggnacacgcaagagaaccctcacatgccccttcaagttcgatgtcattctcgtgagcggcttcaagcattgacattccaacagganccttgataaccttttcctcagcatccttatcaagggnagtcacagatatcgtttctntaatcntttccatccccctcagtagtttgaccattggctgcgttagaaaaacaaaattttcccatggggtatangaaaggggctaa

SEQ ID NO: 4816 - DNA, 550 bp, Musa acuminata
  misc_feature (2)..(2): n = any nucleotide
  misc_feature (5)..(5): n = any nucleotide
  misc_feature (17)..(17): n = any nucleotide
tngtnggcaccaccaantgtccatcaggtacaatgtgtgttctgcacaagactcaaaaggttaacccatacacagaaataattcaacatactggttacaagaaacagtacaagcccagttgcatatgtgataaatcagcatgacaataacaggcaacagtagaggccataaactcagccagccaaaagcagaaatcatcaccaaaaaccacaagaacaacctacatatcccaagaaataatgcagaagccagagctgttgagggctaaatgctcaattttttgattttgagtgcttcacaagccaatcgatgacagagtctatgttggttgagttcttgcatgagatcatgtaacaacaaacctctctgtctgtaatggatttcaggcccatttcatctgtcaaaccctgctttgtcagagcttctggcttatcaattttatttccaaggaccaacaatgggatcccattcagtgatggcttgcttagaagatcatgaagttcactttttgagatgggcaattatcacgggtctgctgcatcaacaacat

SEQ ID NO: 4817 - DNA, 641 bp, Musa acuminata
  misc_feature (10)..(10): n = any nucleotide
  misc_feature (404)..(404): n = any nucleotide
  misc_feature (428)..(428): n = any nucleotide
  misc_feature (517)..(517): n = any nucleotide
  misc_feature (535)..(535): n = any nucleotide
  misc_feature (537)..(537): n = any nucleotide
  misc_feature (544)..(544): n = any nucleotide
  misc_feature (582)..(582): n = any nucleotide
cctccccaantcctcacataaaaagagcaacttttttttctttatctactaaaagctgcttaaagtgatacatattctaaatgtcaagtaacaatgtgattgccaacataaacgacaaataaagaaataaggcgaaataaattaacgcaatatgttattttaagctcgcttcactgacactggtagtatacttgtatttgaggtaagcttttataaatgactcaagatccccgtccatcaccgatgagatgtctgatgtctcatacccggtccgcacatctttcacaagcttgtatggatggaagacataattgcgtatctgctgaccccactctgccttcactgcatctcctcttatttgtttgatttcggaagcacgctgctcctctgcaattacaagcagnttggctttcaaacggctcagggcnttgatcttgttagccaactgagtcctttcctctgtgcaacgaactgcaacaccagtaggaatgtgaacaattctaactgctgtttccantttgttgacattctgtcntncttttcntccagctctagaatagctaatttccaagtcttcttcangtatgtctaaatctagagattcttcaggaagaaggggcataacttcaacacaagcaaag

SEQ ID NO: 4818 - DNA, 412 bp, Musa acuminata
  misc_feature (371)..(371): n = any nucleotide
aacaatgtgtatatggtgggtgatctcgcataagtaatggatgcattgttaaaatagggcatgtgcgatctaattattatccctcccatgtatgaatgacgcattccgcttcctgtgggtgcttctttttccaaactgataaatacgtggtcatgccgaaaccgacgccactagcaaggtcttgaggacaacctcaaccaagttctgcacacctcccaggtagtgccctgtttccttcagctcatggtagtcgatccagctaaggcggctgcagatgtatcgctgtagagtaaccggcacgagcccgtcttcatccccatgccatagatgaactggaaagggcggttgcgagagatccatcggatcaaatncccacttcccgaacatcaccaccatgtctcggtaaaacgac

SEQ ID NO: 4819 - DNA, 631 bp, Musa acuminata
  misc_feature (599)..(599): n = any nucleotide
  misc_feature (620)..(620): n = any nucleotide
ataattttagaacaattcttctgcaaagtaacattacaataggagtgcaggatccaaatggtacagaaccaccaagcttggattattgagtgagatctcttcgagtacatgacaaagagcaaccaattcaaacagcaatggaggccatcagcatgatttgtcttgttcaagaagcagttgtcactgatgcatcttcagaattggtgcttcaagcagctgctgttgcatctttctcttcagttgtagaaggtatcggcttggtaggggcaggcaagcgaccgatgtcatcgaccctgtctcgctgcttcggtggaggcctcgctggtttcggtaataggcgtcccttctttgcgaaccactccggcgtgagcagtgccctaaaccccagcttgttgtagtacacctttctcacggaaccgccggcagcttccaccgcagcttttgcacgaactgtcactctcgatactcaaggtgtatcggccagttgatatgttcagaaccatgagccatcaacctgatgcatcctctatatgctttcctattgcactgtatccttaagggtttccatagtaataagtctgacgagtaattttcctgantatgagtttgcaatcttcccnaacctacaggc

SEQ ID NO: 4820 - DNA, 664 bp, Musa acuminata
ctatgtgcttatcaacattaatttctgcaaaacagtgaagaaaaaacattttaaatagtcacaatatcttttggtccacaaacggaattaaatgatgcaacattagaaccttatttcacccttttatgcttaagccattgtacaacattactagacagtgtagagacatattgcggatgagcatatcggcatttgatgacatccgaccccaaccacaagcaactgaaaggaacctgcaactcaagaagccttcttctgcttgctggcttgccatgccttgcgatccgtgtcgatcttcgagcggacgctggcatggaagccaggatatggctcgtatcccaacaaactaagtgcctcgagcagaacaaaaaatggagccatcaggaatgcttgagaaagattatcaagaagagctggtgctcgtttctcaaacattccatgacctataaattggaaactccagcaaaacaactgagctgccagaaccaccttccatgcgagggagaagccgaggcggacggcgagggcgtggctgccgaaccagcagaggaagcagaggatggcggcgagggagccggcttcctgtccatgaacaggtagaagagggcatagacgagagcgccgacgaaggcgaagttgaagggcagcgtcagggcgtcgctct

SEQ ID NO: 4821 - DNA, 555 bp, Musa acuminata
  misc_feature (13)..(13): n = any nucleotide
ttcaggttccaangcaaacaagattctgaaagcaaggaacaccaaagctaaaccaaagctcaaaacgaacacttcaacgaacacttcaaggccagcaacacaaaaggatcgataggagagagagacacagacagagcgagagaactgtggttgtagtcatgaaatggggggaagtcaatacccgaaccagccctccttgcatggcggcggcggtggccgagagccaaggttagcgtgaggtgcgttcttgacttcccacagatgatgtcctaatctccaccctcccccaacttcctctcctcctatccatgccgcgtgcttgctattctcagcgagccacttcgcctgcaactgaagccttgatccgttcgacggtgcaagcaatgaggctgttcaccgtcgcgaccgatccgagggagagcttggcagtggggacggagtcgaccaggatctggaacgccacagtcaacagggagccaccggagcctacttctccacccttctccgccgcgatggccgtcgggaagaatggcgaacctgacggaagagggcaac

SEQ ID NO: 4822 - DNA, 611 bp, Musa acuminata
  misc_feature (524)..(524): n = any nucleotide
atgtttacagttcgcatgccacgattccacactcccattacaagatattattggtatgagttcattaaacatggtgttctgcggcagtatctgtcagcttctcatgtagtcaagcagatatcatatgcatttttttactaagcagaagctttttttctcagaagatggtcaaaactgagtgtgttgatctttgcagcaagtataaaatcgttttcggtgagccctccagctgagtgagtccacaagtcaatttttacattattccaaccaaccagatgaaggtcaggatgatgaccttctgcctctgcagtattcgctacaagctgaaagaactccaatcctttggtaaaactcttcactttccatgatcgatgcaacttcaggatgcctccttcacataccaagccccatccttgcacctgaacaaggagttcattggctgattgttctgacatagctcgtatatcctttgagttgcatgggacacatttcttgccagctaaatcttggggtaagaacaagancaaaaaccatgggtaatctcctatttgatgacacgttaacatgggctgtatgcagcttgacaatccaacaatctgaacatccatgac

SEQ ID NO: 4823 - DNA, 532 bp, Musa acuminata
  misc_feature (281)..(316): n = any nucleotide
aaatcatctcattattcttaaatatacaagaaaatgctcagaaaacactatgatattacacatccaatatttgtttcaatttcaaaggacatacacaatcacatcttccttaaattgtctaaccttgactggagttcattgtctattccactatctccatttccagctgcttcaggttgggcaaccttgttagctgcctcaggtttggccacggcagttgaaggtgccttgacaagctctgcattgatatctactccaatttcatccaggacctgattcannnnnnnnnnnnnnnnnnnnnnnnnnnnnnnnnnnnccaaggcatcatctattgcatctcccattacctcacttaccatttccatcttctcattctgcagttcaaactcttgcattatcttctgcaatgctggtaggttcatctgcctgttcatctgtgccatagccttggtgacacctttcatggcctcacccattgcttgtgttgacttcagtgtctgaattctaagtgatacacccttgcagctgtgac

SEQ ID NO: 4824 - DNA, 1028 bp, Musa acuminata
  misc_feature (4)..(4): n = any nucleotide
  misc_feature (810)..(810): n = any nucleotide
  misc_feature (1000)..(1000): n = any nucleotide
tcancataagaaaattatggattagatttcaggtttcctgtccttttcatttgctttcagcgaatgctatgtatacaatcaaaactatgctgagtaagactgcactaccacataactggtaacctacaaagagcatacattgcagctctttctacaaaatccaagtgaatccttggatcctaccatatagagaggattctttgcacattctcctgctgcagcccactgtgggcaaagaacattctcatcttcacatgcgtcgcttgacctgtttttctctggtttgtcgaaagacctcacatgaatccattttgttgcagaccacttctcgccttctataacagggcagcttccatgcaagcttttaggatctgttgttgcatcaaggtggagactaaagaagagcaaggcgtcacctttttcaggttttactgcataaccattttttgcacaatctgaccaggtatcattcttcaactgagataacttaccctctgagttgggaaagatggtctccccacccttctgaacattggataagtacatcaatacggtggcaactcgatgaccgccaagttgttgattggtttggtcatgaaaataatcaaaatgtggctcatatttttccccaagttcatagtgcagtatttgcatggactcgccattctcttctggaaggaaggtccaagcagcaatcctcttctcaattcttgcaatgacttcatcctggcgcttctcaaggaacattccagagctcgtcctaacctcgctcatcacactcttacccaattcattatccgcaaccatggntttctccagcttatcctttgccagcgtcataaggtgatcgcattcgtcataggaaaggaaccgttgtacaggaaagccctggggcgccacgagagctgggtgacccgagtgggatcgaagaagtcggagtccgcttcggcccaacgacgatccaacaagaagaagggctgcgaagaaggggaagaggacnggtcgaagaagatcgtacgaacaacagt

SEQ ID NO: 4825 - DNA, 584 bp, Musa acuminata
cttcctccttccaccagcgtggacagcaagaacaagaaagattatttatactcgatgttacagtcaaatacatggggttaccgtaggaaactatagcggagtttcttgatttctatcttcgtgcaggcaaagccaggttagagagagaattggcgcatgagtatcaagtgttattcccaaagcccgaggaagaaagagtgggggtgggtcatgcatgcggtactgggtgcgaggagcagagtcttcccacgctagctaacatgttgccgaatggatgaagggattgaagaagcgaggagttggtggtgccgccgcgaattcttcggcaccgccgctgttgcagctgtcggcagagcctccaaccctgttgcaggaagggcacatggtgagggtggccgccggaagctgcatgtagagcggcggcgtgaacttgagggccttcagctcctgcagctccttccgcagcctccggttctcgacggtcagcgactcgcagcacctcttcaggagcttcgcggtcgacttccgtctgcttcagcttagtccttgctctcctgttctggaaccatacttccactgccgtg

SEQ ID NO: 4826 - DNA, 599 bp, Musa acuminata
cttcagattcactttcacgagagttcctcacaccggaagcacactcttattgtgacatattcgatactgcctcactgaccaaaccaaacccacatcgaatccccgagctcagatggagacgctgttggggattccccgtccggtgagcccgccgacgccggtcaagtcggagacgttggggtagagcagcgtgtagggcatcttaaccgggccggtgcgattcctcaggctcgcgtcctggttcatgcttatgatccgattctcgatctcgatcaacttatggctaaatcgctcgaacgcctcgagcgcgctgcggtccgtggtccactccggcgagtccctttgcccaaggtacacctcgtcggaggagtggcgcgacaggacctcgatgagtgacacgccgaggatggtctggaactggctggtgatggtcttcaggaacgctaggtccgggttcttctccagctcgtggtactccggcgtgcccggctcgggcatgaaccgccgactgatggtgggccggttggggaggtagccagcgtaggggtactgcccgaagttgaccgccgcgtgcagggcggaggcacccagatgatggt

SEQ ID NO: 4827 - DNA, 514 bp, Musa acuminata
  misc_feature (14)..(14): n = any nucleotide
  misc_feature (67)..(67): n = any nucleotide
  misc_feature (110)..(110): n = any nucleotide
  misc_feature (134)..(134): n = any nucleotide
  misc_feature (141)..(141): n = any nucleotide
  misc_feature (176)..(176): n = any nucleotide
  misc_feature (287)..(287): n = any nucleotide
  misc_feature (508)..(508): n = any nucleotide
agcttacttggatntgcttacttgctgtgggtgggattggtgtaattgggggacacaggcaagccancctctatcgccaactacggtggttcagatgctgaaggagaatnggtttcagaaggtgaagctgtttnatgctgnagaaggcacaatgagtgccctgaggaagagtgggntggaggtcatggttggcatcccaaatgacatgcttgcgatgctggccactagtatgaaggctgcaaacaactgggtgtccaataatgtctcagcatacatcaatgatggantcaatatcaggtatgtcgcagttggaaatgaacctttcttgcagacctacaatgggagctttctgcagactacttttccagcactccaaaatatccaaggagctctcatcaaagcaggcctcagtaaccaggtcaaagtcactactccacaaaatgctgatgtttatgcgtcacctagtggtcgaccttctgatggggacttccgctctgacattcgcganctcatg

SEQ ID NO: 4828 - DNA, 560 bp, Musa acuminata
tcattaaacaggaacagtagtagtcaagagaaagccaacatgagcttcaaatttccttacaagacaaaagagccgaacaaaaaacaaggaaatttaccacataacatggaagaacaccaaattgcacattctgctcaacagcatcaaatcctaagaggcatccctaatctatccaacctgcctgagccaggataagccttgttggtgaacttggcatgcagagacgacgacctctgagctgctactgcccccgaggatctcttcagtgatccagacttctcatactccggcctctgcttcggtgcgctatgcgacctcagtttcgccgtcgaagactgcgtgttcgccatgtagttggggaagtctgcgaacccactgaacaagctctgagagccctcgccattcgagggcgtgaaggggctttggttgcgctgccacgccgtgacgacgatgagtagtactgcgggcttccgcagaagcccactacctggagcgggaacccagggagctcagacattgctgctgcatgttgacggaggatggctgggaatggattgttg

SEQ ID NO: 4829 - DNA, 719 bp, Musa acuminata
  misc_feature (89)..(89): n = any nucleotide
  misc_feature (118)..(118): n = any nucleotide
acctcattggtagttctttttatgcttaatccacatgtataatgcttttgttacattccaacatagtacctaagtttgaagaagattanccagaaaacctgggtatatacagcatatnatatcagcaaacagaataaaaacaagttaaaaagctctttattcatcttacagcttctgcatatagtgcaatgttactggtcttggcacacgagataatagtcttttaaagcataaaatgggttttagaggtttgatagatgctgcaacataagtgcaataattttcagaaacacacacttgcggttggcgatgaacctcgaccagccaccttcagtggaagaggctcccagactctaccctcaccctcactgcagtgtccgcttgatttgacagctatagctgcctggtttatcgagttgcttgagctccctgctgctgcttctgccttgagccggagccgctcagcccttgaaccaatagtctgacctaaaattgaggctgctatggttagtgccatagctgtcttgggcatgaccacagacttcctgagcatgccaatgaatggcacagcagcatggactgcggcaaaccactgaggagagaacttttcagtatgttctcgccaaaccccaaggggaacgttgcagccatgcctagcaaagtattgctaacatttttgcaggcaggggtggggacggagggtcttcacaagggagtgc

SEQ ID NO: 4830 - DNA, 524 bp, Musa acuminata
  misc_feature (6)..(6): n = any nucleotide
  misc_feature (12)..(12): n = any nucleotide
cacaangcaacnccgatatgcattaaatagaagaccagtttcactgggataagttctgcagattccacataaaagaaaatgcaaaagacaaaaaagaaagcgagatttcaaatgtcttagcagatcaagcagcaaaggtagaagagcaaaagataactatttgccattgagatgatagatagctgcaaaatccaccaagactagagatctggggcagttgctgccgaacgcttgatagaagcagacttgatgagatggttgtagcttcccttttccttgaagagctgggagaaatggtgcttgcagtacaggatcccttcgagtgctgcatagttggagggggtaattgagcagccaccatgagaacatttgaaacaggacttgtgatatgcctgtccttccacagtgaccttttcaagaggataagctgtttttgcacaagtggcacatttttcttgtgttccagagaacatactggcggctttgctgggagacctagtcagttccggagctttttcagctga

SEQ ID NO: 4831 - DNA, 603 bp, Musa acuminata
  misc_feature (2)..(3): n = any nucleotide
  misc_feature (5)..(5): n = any nucleotide
  misc_feature (9)..(9): n = any nucleotide
  misc_feature (13)..(13): n = any nucleotide
  misc_feature (451)..(451): n = any nucleotide
  misc_feature (482)..(482): n = any nucleotide
  misc_feature (574)..(574): n = any nucleotide
  misc_feature (579)..(579): n = any nucleotide
anncnaaancgtnatatcttgattttatttcaagcacacatgtattatctacttcccacatatgccacaatgaacatctataagaacatcaatcaaagagaacatctgagcaaccaacataagtttcactccatacaaactatacaagaacacaaagacattgataaagtcccaggtccaattataaaaacatctgcagggttaatgtgcatcttgcacagcttcctgtagaattctcacggcactatcatagttaacaaaccccatgaaccagaactcatggttgtcaacggacacgacctgtatatatttttctcctgtatttgctctgcttgctgcgggattaactgatcttaactgatgaagaggaattgccaccttataatagctccattcagttttatctccaactttatatgagagaggattatcactacaaaatgcaagtttngcagtcgagagatacaagacgcccataacangaccagcagatgttgacaaatagcaagcatatgacttcttaagtttctcttcggaagaatctcgaaagtttgttgaaatatcttttcataanctccnttcaggctatgactttgggatgtc

SEQ ID NO: 4832 - DNA, 585 bp, Musa acuminata
  misc_feature (87)..(87): n = any nucleotide
  misc_feature (90)..(90): n = any nucleotide
  misc_feature (98)..(98): n = any nucleotide
  misc_feature (110)..(110): n = any nucleotide
  misc_feature (202)..(202): n = any nucleotide
  misc_feature (224)..(224): n = any nucleotide
  misc_feature (237)..(237): n = any nucleotide
  misc_feature (244)..(244): n = any nucleotide
  misc_feature (271)..(271): n = any nucleotide
  misc_feature (288)..(288): n = any nucleotide
  misc_feature (306)..(306): n = any nucleotide
  misc_feature (440)..(440): n = any nucleotide
  misc_feature (445)..(445): n = any nucleotide
  misc_feature (451)..(451): n = any nucleotide
  misc_feature (509)..(509): n = any nucleotide
  misc_feature (520)..(520): n = any nucleotide
  misc_feature (523)..(523): n = any nucleotide
  misc_feature (539)..(539): n = any nucleotide
  misc_feature (551)..(551): n = any nucleotide
ccatcagcatttatttagaagaacctgaattttttttttaatcgatgacaaggtcttcttcacaacaaaaaaagaatcaatgctggngtnctagtganagggatgctcantgcaagtcttccaatagatgttgcatcactgtcttgttgcttatgagcttcccctagtaattttggggtctatcaagaacatattctgagtnactttggttgcttaatttccgngttcctaaagcanttctgtnagtgagtaagcattgatcatagggaanaagtttgggaacggttnagtgtcatcagaagttanaatccgaaccctcctgggaatccaccacctggaaatccaccatcaaagtgaaaagtgaattgttgtccgccgccaaaagggttaaagcctccacctcccatccccgtaccctcatcaagatcctcgcctctgtnatatnttacangtttctcttcatcaccaagcacctcataggcagcagcaatttcctgaaacttggcctnagcttcctcanggntatcaacattcttatntggatgccactntaaagcaagcttcttgtatgcacgcttttatctc

SEQ ID NO: 4833 - DNA, 690 bp, Musa acuminata
  misc_feature (16)..(16): n = any nucleotide
  misc_feature (56)..(56): n = any nucleotide
cgatgacagattaatnagctataacttgcagatacataaagtgagatttgcatgtnttgcatgataacacttgggcaacctgttaaactagcagaaaatatcatccatcccatccatccaacttgtgagataaaactgtgataattccaagtattgaggttggtctataattacatccttttgatcttcgagaatgtccccgtctcagagaaataggtgctttgtattccactgccgagctgattcccatgagcttgtggatttgaaagttcgattccttgcacaggtgtaaatgctaaacttgatgtcaatcctgaagttgccccactgcttccatactgtttctccttgaaccttttggcaactttagcagcaagtttgctctgcgcaagtgatacacgcaactttccacttcctgcctgaccaagcataccatacccttcacccaagccatcacccaaggaactctcttctggaactccaaattgcatcctgttggccagcttcctcatatcagtcactgcatatctttctttcattttccgcagtcgacgaccacctctcttctttttgggctctgaatctggaactggaaaaggtttcggctgctttgcagggggtggctcttgccacttctcaatctttttacggatttcttctcgcaagtcccttccagtttttctgtaggat

SEQ ID NO: 4834 - DNA, 572 bp, Musa acuminata
  misc_feature (7)..(7): n = any nucleotide
  misc_feature (15)..(15): n = any nucleotide
  misc_feature (21)..(21): n = any nucleotide
  misc_feature (528)..(528): n = any nucleotide
  misc_feature (543)..(543): n = any nucleotide
  misc_feature (569)..(569): n = any nucleotide
accatgngatccaantgtacntttcttattaccaaagcttacagaacagttaatacacttcccagtgcactgtggctttcgccacattaggtaggtttaccggttgatggggatgactagggaatcatctacatatacattagcaacagtcacactaaattatttgtaccaatgaattgctgcacccctacaacgaacatctgcatgaacaaaaacaaccactaacaccaccaaatacataattctctactcctactgcccttctaaccccaacctacagctagaaacctgcaattgcttcaaacatgtaacaaagattgttttaaggtgggaagttggatgtcccctagcttggcacaccggtgtttttagtgcattaccatcccgaagatgatccagccaccatccagtttgataagtacatggcatctttcctaaatcagttcatgttctaggcgaacgtgcagcatcagaaccatatgcagaggagctttcactatctgaatcacttgatgatgatcctgaatnactactagagctgcntgaactactagatctacttgcatttnctc

SEQ ID NO: 4835 - DNA, 520 bp, Musa acuminata
  misc_feature (7)..(7): n = any nucleotide
catattntttgcagtgcatggtaaacacaaaacgtcggtaccaaattcatgtctgaaacagttaagaagacaatgagaactggtcccactcagacaagagacatgcagtaactccaatcacaccatgtccactagctgacacacacaagccatgagaagatgagcaactttgggtggaggtacacctagaaaccatggatcttgatgtgttctttcttcacaataccggcctgaactaaaaaggaagaaacattcttccgctgatcaccttggagctgaatcacctggcctagctctgggtcctggacaacggttccattacagcagaactctttcttaaggtccttcaggatcttgttgtagctgaactctttctttaatccctgcacagtggttagacacttcctgccattccgctgctgtacacggacgtgcacatactcctttgcaccaacacccgaatcgtcagcattcgcctcagcaaaaggatcaaaagcagtagggagcggcagtccagatc

SEQ ID NO: 4836 - DNA, 360 bp, Musa acuminata
  misc_feature (12)..(12): n = any nucleotide
  misc_feature (28)..(28): n = any nucleotide
  misc_feature (204)..(234): n = any nucleotide
gcgcgtcgaccntaaataaataataatnataatacaggacattcttagccatctaatatggtgaattgtggccaccatcctgcaacgtaggagacgacgtgcgctattcctcactcttcacagctcccccgcatcatcatcatctctctctccaatcactcttcaagatcaataggcacgaatccccaccagaattccttcttnnnnnnnnnnnnnnnnnnnnnnnnnnnnnnntgaaggtgtacgggccggccatgtcgacggccgtgtcgagagtcatggcttgcctcctagagaaggagatgcccttccaactcctccctatccacctccccaaagcccaacacaagtctcctgact

SEQ ID NO: 4837 - DNA, 662 bp, Musa acuminata
  misc_feature (8)..(8): n = any nucleotide
caaccacnaattaaacaagacatcataattgatgaataactaagatcagaacagcagaaaatgtcttgaaactgaactcaaccaaatacaaaatcatccttctgagacaactcagaaaatgtggattaggtgaccaagaacgtctatgatgaacagtagagtacggtagcaagacttgctgtttggcttatttcttcttcccagccttagcagcatctccagcctttgtcttcttaacaccacggactttcttcgccctgttcttcctttccttcatctgtttccttgatttctctacttttgttgcaagtccattcctaataagccgatacttgggctcatacttcttggcgttctctacggtgtcgtagatcaaaccgaatcccgtcgacttccctcctccaaagtgcgtccggaacttgaacacaaagatcgtgttggtatcgttcacctcatacagcttcgccaacttctccttcaattccgccttggagacatttgctctcccaggatgaagaacgtcgatgacgaattgcttcctggaaaggaggcgattggtcatgaatttccgggttcgaatagtaacagccttcgtatctgcattttctcctcctaatgcagcgagcaggagtaccgagtagcgagcggcgatgagcggaaga

SEQ ID NO: 4838 - DNA, 652 bp, Musa acuminata
  misc_feature (7)..(7): n = any nucleotide
  misc_feature (27)..(28): n = any nucleotide
  misc_feature (33)..(33): n = any nucleotide
  misc_feature (37)..(37): n = any nucleotide
  misc_feature (53)..(53): n = any nucleotide
  misc_feature (60)..(60): n = any nucleotide
  misc_feature (82)..(82): n = any nucleotide
  misc_feature (88)..(88): n = any nucleotide
  misc_feature (92)..(92): n = any nucleotide
  misc_feature (98)..(98): n = any nucleotide
atgtagntggcaggagtcatataccanncaatntaanactcaagcattaaaanctataangtgactcgaaaattttaggggnagaaanaaancagganaatgctatcttttgttgtggtataaagtcactgcctcttaattcgagatggaacggcagagtctatcctttcttttcaggtactcagggcagttgttttacagatgggacataaattctttatcatcaaccattgcttgatgcaagcagtgtggaagtcatggccacaatcgagtcggcccaactctgccccttccatgtattcttcccgacagatgcagcatggttcaacttcccccgatggttctgatgcaatagatacatacttccgttgtcgtaggcagttcaggagtttttcctcgctgagcccagtgttgacatttcctatacgctctcccaacaccaacagttcctcataagacatattatccacatccagccgcatatctctatacctgtcatgaaaattggtgcccccaacatatcctgactgctcaaatgataagaaatcctcaagcagcaaggtatccccccgacggatgagatcaaaaacattacgaatctctgacgtcctgcttctgcgttctcttgcagctgctagagtccgcatggaca

SEQ ID NO: 4839 - DNA, 559 bp, Musa acuminata
  misc_feature (216)..(216): n = any nucleotide
  misc_feature (416)..(416): n = any nucleotide
  misc_feature (457)..(457): n = any nucleotide
gttatctcatcatttttacaaaagcaaatttcaatgtgctgttctgaacaaaacaacaaaaacttagaaaaacaatgactttgatcgttcctccaaatatccggatgcatgtcatgccaccgagcagtttataattaccatcctgctgccttccaaatgaataaatatctcatccattccaacgaccaggaaaggtctagtactagaatctagggntctctcatttggaacttgaaaggtctagttcttatacttggctttactgttaggggggacgtccctgaggccaagctttgacagcacaaggcaataagaatcccagtctgtcctcctgagatacttgagaagtttctttcttctctggatcatctgctgtagtccctttctggagtgcttgtccttcttaggtaagactntgttgaggtgcttaattttggtggtaagttgtgccacttgnacaggcgcagagccacaatctgattcagacattttaaattcgtctcgaacccgcttgagctccagcttcatcttctctgccgatgacatgtgatctggatga

SEQ ID NO: 4840 - DNA, 479 bp, Musa acuminata
  misc_feature (6)..(6): n = any nucleotide
  misc_feature (448)..(448): n = any nucleotide
  misc_feature (465)..(465): n = any nucleotide
ttcacnagtacagctttcctcgtatcagcccaaagaaagcactttctcaggtattagccgttttctgcactgtcataagcattagatttgtgtttaggtgtaaaagtaaagcgttctggaacctttccaagcaacatctcagatatccgaatccagtcagcagctgaatcagaagccattagggtctcaaggtcatctcggccatagtagcctggggtggtctccaatttaaacgctgtggaactacatctaataggcccagtggaatatagcggtatgtataactcaaccattccaacaggaaatgcctcgttgtctccacacctttagtatcggagccccaatgctgtaggccagatcgaacaaaatctttgaggatattgaatcgctccccggaactaatatcccaatgtctttgttccttaatctcagtaaatatccaaggctngattagagccctcgagnaatcatgcacgtag

SEQ ID NO: 4841 - DNA, 624 bp, Musa acuminata
  misc_feature (578)..(578): n = any nucleotide
  misc_feature (585)..(585): n = any nucleotide
  misc_feature (616)..(616): n = any nucleotide
agcaaccgactgatagtcgaaataggaagagtatggtagatccaaaattcaattaccatttctttcagcttcattcaaacaaaataatctagtcatacaagtctcgaggatcaacaattacgaaaacctttattgacacaactttgccacaagtgatgcatccacagatccagtcctcaaatttgccggaacagaggcatttttcacaggttttagctctttcataccttagcatcctagacgctcaatggtttttggcgtctttgaacatcataatggacgtctattaaacctgttatgccagctgtgatcttttggccgatcttcactgggccgacgcctgaaggagtaccagttaaaatcacatccccttccacgagagtcataattgaactgatatggcttacaagaaacggaagtttgaagatcatgtctttggtcgaccctttctgcttaatttcatcatctaccttgagccataactcaagattgttagggtccaccaccattgatctgggaagaactgcactaattggagtgaaggtatcctgccctttggccactgtccaggggagacntgctganttggcagcagattggattctcttgctgtcanatccaaag

SEQ ID NO: 4842 - DNA, 587 bp, Musa acuminata
  misc_feature (41)..(41): n = any nucleotide
  misc_feature (44)..(44): n = any nucleotide
  misc_feature (47)..(47): n = any nucleotide
  misc_feature (57)..(57): n = any nucleotide
  misc_feature (140)..(140): n = any nucleotide
  misc_feature (252)..(252): n = any nucleotide
  misc_feature (315)..(315): n = any nucleotide
ggatgagaatgctcagaaacaggtagaaaatttggaaacgncanatnaggtccatgngatcaacggaactctcgctggaaggaacaggcaaagcaagttggaagaattgattctaagatattaggaatcttaaccaagtngttgtttgggacttgttaaagaataaacgccttcggtatttgacctggaaccacttcatggcattcatccttggtaaccctatggctggattccaacgcgtgacttgcatcngcggcgacgggccacacgataaccagcacgttccaagaccacatagaaatccatgccataganacctgtggacgggtcatacttgattccaagatcaatgtgttcttgtatgccgaaaccaaaacaaccagtgtcactgaagtttcttctcagaagctcatattccttcactttcagtccactctccaggagctgcatcgccttgtcacccctgacggtgacattagcacgcaatcttttcgttgcgctgatcccaaatgacctaacagtgtatcgtgccttcgagaacaccggtgtttgcccgctcattgctctaacaccttgggcggcctagt

SEQ ID NO: 4843 - DNA, 595 bp, Musa acuminata
  misc_feature (561)..(561): n = any nucleotide
  misc_feature (584)..(584): n = any nucleotide
aacttcaaaataatctgactttatgacctgtgcttgtacatcagaatgtgacagagagatcatctacagacaagcaattattttgacatctcgctcggtccacgagttgtggacacagcaggtcacattaagcctgcagaaacccattgttgtcgaggaacgaaatgatttgctcagccatagcttttggagtaggacacttgccatcgttctgttgtattactatctcacaatccaagggtgattcatatggatcgtctaccccggtaaagccttttatttttcctgctcgtgcaagcttgtataaaccttttggatctcttgcctcacagacctccaaaggtatattaagaaaaacctcaataaatgaagaatctgatagcattgcacggcaggcatctctttccttcctatatggagagattaaactagctatacaaatgagaccagcatccgcaaatagttttgctacttctccaactctgcgtatgttttcggcacgtcttctccgttgaaactaagatctcgattcagaccatgtctaacattgtcacatcaagntgtaagtagatgactctgtaggnaactctcgact

SEQ ID NO: 4844 - DNA, 440 bp, Musa acuminata
  misc_feature (6)..(7): n = any nucleotide
  misc_feature (14)..(14): n = any nucleotide
aaaaannccatggnaagaaagattttttttcttcatgattctgctgatggaatagatatctcagttcttgaatcgtttccggacagtcagaaatgatgaaggaatcattcatttctcgctacttcacacctgttctaaatctttttctctcgtgtatgttgtaacatttcatcctatcaacactggaatttctgtacaagacttttctaatggttcccgaaaacttttcctatacgaccatgttttggctaccaacattatcttgtctcttctctagaagttctccttgtggaaatggaatcgagtgctggtgtcatggctgaattcttgtgaaagatccttcagtgattttgtgagtgtgggaggtccacagtagaaaacaccaattcgagcagctttatgggtgttggacaagtcggtaaacactttcctccagtttg

SEQ ID NO: 4845 - DNA, 603 bp, Musa acuminata
gagccacgttgagattgactgattcataatattagtattacatggggttgagatttgatgtttctttacaacaggagagcatcaacacagcaggaagaagaaagacaatccaagctttggtgttctacaggactaggccagaagccagaagttcttctgccatctggtgctcacaaggaatccacccactccactgctctgtttcctcactgccatggtcaagcactcggctctgctgatgcactgctccaccaagtcctcatggctgctctggaacatgcagcacagtgaggatggtttggactgcttcagcaccagaacagaggcatcaagcttcttgacttggcccagaacggtggccagtttgggtccttggataaccaatgcttccactcgtacctggggtcgcatcgccttgcacatggaaccaagggagttgacgagttgggaagtctcctcctccctgtgagcagaggcggagcaatggggagggaggacatggaggagggtcatgacgtcccccttgttcgccacatgagtcaacgcccacatcatggcatgcttggcgcgagcggtgcggtctatcaccaccatcaccctctt

SEQ ID NO: 4846 - DNA, 590 bp, Musa acuminata
  misc_feature (2)..(2): n = any nucleotide
cnactttttatctatgaacaagatcatcagggacctcagttccccaagcggcaagctgcttttcttcatgctgtacaggcttatcttctgcagcttctttacgagccatatttgccttcaaaagctctgttgcagcttcagcagcttcaattcctgctgagcctgtgcagtagctattgcggatggtttgtttacagcatttgtagccccaatggtgatccctccaccatgatccccaaactgtggtgtggttattgatatagacatcttcttcatatttgcttctgggaagggaggtctcctggcctcttattattcgaccagcacgatcatactcaacctctctctcactttgtccaagaagaagttctctaggtaatgcttcttcagatgctgcatttccatatttctccatgatggtatcctttgtgttgtttttcaacttgtccttgataaccttataattcttaaagagtagttctgcttgagaaggggcagcttgcatgtggatatctgtcccttctcaaaagcttcccaggcatggatgttaagctgtttaaactccagtgcttggtccggctaagtctgtt

SEQ ID NO: 4847 - DNA, 587 bp, Musa acuminata
ttggatatattcaaatatgtcgtttgaatttgatcatacattgcaattcttggggcaccaatgctctcaaaaaatcggtatggaattcaaaactattacaataactgtatgaatgatagttacaaaaaaaagaatatgaacctcaccgactacctcattatccaatcttcaaagcctccctaaaaccaataccgaaacttgcatgcactcctttcttgccaaaaccagtgttccctttttgcatcatagctacaaattcattgtaatctatgcgtccgtcattatcttgatccacgtctctgatcatatcctccaggcgcacatcttctatgccaaactcctgacaagcctgctgcagttcgtcttgagttatgtaaccactcccatctttgtcgaagtatgagaaagccgcaaatagatgatcctctctctctatcttgtttagatgcaaagtggcagcaataaactcgccataatcaatggttccgctgttatcaacatcgcctgcataagagcataaatttctgactccttgagattagcaccaaacttttccaatccagccttcattcttcataggtatctgt

SEQ ID NO: 4848 - DNA, 564 bp, Musa acuminata
  misc_feature (489)..(489): n = any nucleotide
  misc_feature (563)..(563): n = any nucleotide
agattatactgcagcacagagactaagagcggtacatctgatcacggagaggagggaggagggagctgcatggatagtggaggtacagtagattgcaccagagacagtagacaacagagacggagcggtggacgcatgcacgatggctctctatcgccgcctggcagcggtctcccgctgagaattgaagtagacggcggcgacggggaggtcgagggccgttctcctcggcgaaacggcgcgtgctgaagcggtccctcgaggccggcgggctgacggcttgccgtcgcttctgcttgaagagcacgaagacgaacctgtggatgccaatgttcggccgggggctctcgtagctcaccacctcccttccaaaagaagcatctgttgtgcctggaatgtcggtcacaatccaatgcaggtgctccctgagatatggatcgcttggcccctgggacgtctggatctgtcataaccagtgtgaagaaggancctcatgtcaccaacctgcacctcgactctgggccttgatgtgactgtagaagggtagaactcatggccattgna

SEQ ID NO: 4849 - DNA, 388 bp, Musa acuminata
  misc_feature (119)..(119): n = any nucleotide
  misc_feature (286)..(286): n = any nucleotide
  misc_feature (337)..(337): n = any nucleotide
ggtgaaaagatacatgctgtgcacttctggcaacgtaaaactcagatatcacagaagatacaaggaagatcactgcttcatgaggttaacaacatgcacaggtagtgttagtgatccantaagaaaacggcgctgtcccagatgctaatgctttctgttgtgctctttgatctttttgtgtttcttggagttggtccatgatgatggtagactattctgggaagttcacatgttcttctgagctgctagaccatagggggtttgtagtcaagcatttctcttatgnttaaccgaattgaaggtcccattgatgaacaaatatgtgcacttttccagnatactccttttgcaccagaaggtttgtttgcttctatcgatctaactgctg

SEQ ID NO: 4850 - DNA, 688 bp, Musa acuminata
  misc_feature (14)..(14): n = any nucleotide
  misc_feature (655)..(655): n = any nucleotide
tagaacttgaatantatggtaaacacaccaaaagaaggaagaacatgaataatagaaccttcatgaataatagaaccttgaataagaacatggtaaacacaccacaagcctgaagaggtcatattacaagaagtaggagaaaaaacccacaaggaaaccaaagagataaacatccaatgcagcttcttctcatgaggtacctcagatcgtttgttcgatatcagggaagccatttgaggtactttttgagttttatttaggaggcagacttagataaatctttggtggatctgttgtatttcatgtgactcttcacgagctgtccagctgcaagagccgagaggagggagagctccccggctagaacagcgcctgccacgacggacgccaggcgtctcgcgtttgccccaggagtgtccaagcttgcacccttcacaccaagtaggtccaagcaggcagactgggaggccagctgagtcccaccaccaactgtgccaacctcaatggatggcatggtcacagagacgtgaagatcctttccatcattgacagcttccatcatggtgatacaatgagaactctccacattctgagctggatcttggccggtggctatgtagatggcagacactatgttgctggcatgagcattgancctccaagagatccagcaaccgcagagccagca

SEQ ID NO: 4851 - DNA, 564 bp, Musa acuminata
  misc_feature (502)..(502): n = any nucleotide
  misc_feature (514)..(514): n = any nucleotide
  misc_feature (521)..(521): n = any nucleotide
  misc_feature (546)..(546): n = any nucleotide
agaagtttatgactttcaacttcttgcttggtttaattggtgcgatcacacattattctgatcatcgataacatatcgttgtttaaggttacaggcaaaagggagaacgagattatatatcagaaacaactgatgagaggaacatatccagacttgtgattgagtttccatttcaacatgcagcactcagaaaatgaagaccacactgtcatggattctggacttctgattctgtgccacacattcagagatccacatcaggttccgtatctcctgctccctcagtctcatataagcaaagaagacagcatagtgaaactgctgttcaaaagccaagcagagtctcttcacttcctcttcataaaatgctttgtccagcatctgggctttctccataagatatcttggcaaaaattgactgatatggtggatatttctccatcacagcacggacctggtcaatatcctcgctgatagcaagttcttcatgaccataaggatntaacaaggccanagtttgnataaagcttccgacgatcatctctngtcattcagtgcccatgc

SEQ ID NO: 4852 - DNA, 633 bp, Musa acuminata
  misc_feature (602)..(602): n = any nucleotide
cacatgacattcatgttcaagaaaaaggcactgtcttgtccctgggatgtcctaatatgacctcagatgatgtggttcggtaaacttaaataccaacatgatagaataacatttttgggctcatgcaagatttgacatcaaaatcttaaagaaaaatctcatagttatgatgagatgatggtttgttctagatctcatcgaggaactccaaaagatcgtcgacctcttgcctcaaggccgctaatttctgctgctgtgatgcaacgcggttctctatttctcgcccaccaagtttcttctcaaaacaatcaaccaccgtggaatgtctcattaacatcttctcttgcatatctttctcctttgcaaccagctcctctacctttggccatatatgggaagcctgaggagaatggtgaagaaacgtcaccaatggcttcaactccttgaccaattctttgagttgtgcatcagctgtcttacgagctattttacatgattggacatctcctgtcctcgagagatctcgtagggaagcatccagcttgtcatggactgctaaacattgattgatgatattctggatctgctgaactgttgcttgnactcctctaattgaatttttgcaagatacga

SEQ ID NO: 4853 - DNA, 434 bp, Musa acuminata
  misc_feature (12)..(12): n = any nucleotide
  misc_feature (300)..(300): n = any nucleotide
  misc_feature (368)..(368): n = any nucleotide
  misc_feature (388)..(388): n = any nucleotide
  misc_feature (390)..(390): n = any nucleotide
tgcatcacctgngcccagcggtgatacccccaatagcaaacataacctggctaaaaaatgttgcaactgactgttcattagcagttggaggaaggccaccaacatatacacgccgagcatgccgagtagcatggttgagtcatggcttgcactggcatgatagggatagttggaatctgtccagctgccaaagaaaacatgttcggaaacattccaggaatggctggagtggctccaggaagttgacctgtatagagaaactgagtagctgacatgtaatactaaaacaattataataancatcagagaatatatgcagcatcattcttttatgccctcgcacgtacgagatttgatctggattctgnaatagaattcatcacaaagnanacaaataaactaatcactttcatggattaaagataatatatgta

SEQ ID NO: 4854 - DNA, 551 bp, Musa acuminata
gttcatcaagctgcgagtgtagaacaaatttttagggtctcaaagatctgatatcctgtatcagcttctcgaatgccgtgaaggatgagccgccggtggaggagacgctgtctcttgccatctccgccatcttagcggcggatgtcctcaactcttctgccttgtttccctccatcatctccctcaccatcttctccacgatgtccctgccgtgcatgtccttcatgtccaatcctaccctccacacctcccccacgaacctgctgttggtctgctggtccgcaaagaatggccagcacagcatgggaacgccggccaccaggctctccagcgtcgagttccatccgctgtgcgtcaggaagcaccccaccgctgggtggcccagtacctcctcctgcggtacccactccaccaggtaccccctctccctcgtcgctttttccagctgcgctgctatcgctccggcggcggcggctccctcgcccaactcttttccgtcgaccaggtcccgcctcaccacccacaggaaccgttgcccgctgttgaccagc

SEQ ID NO: 4855 - DNA, 446 bp, Musa acuminata
  misc_feature (13)..(13): n = any nucleotide
  misc_feature (152)..(152): n = any nucleotide
  misc_feature (232)..(232): n = any nucleotide
  misc_feature (243)..(243): n = any nucleotide
  misc_feature (269)..(269): n = any nucleotide
  misc_feature (335)..(336): n = any nucleotide
  misc_feature (371)..(371): n = any nucleotide
cctggtaaatatnttctctctaactcctaggatagaaggatatctgccaccatcatgctttttcaaaaattcttgcagcaagtttctcattttaaaggcctcttccatgtagttatcctggttcatatctatagtttgtagaccttcaccangtgtgaagataatagcatggttttggttttctggcttcccttcacccagaattgcagggcctggaagttttattcgatanatctcctggtnaagattttgtacttgctcggatggancatcagtcttagacaaggaagccttcaccagaacagaatagtagtctttataggttttcctacttnnagtagtactagttacctcaacctcatcaatataanccacacgaagagatggatacactctcatgagttttaaaatatcttgtgcacgttggtgaccagatcttttgtcaa

SEQ ID NO: 4856 - DNA, 558 bp, Musa acuminata
  misc_feature (512)..(512): n = any nucleotide
cattggttagattggttgattgacatatctaagaaattggttcacactcccaaataagtagttgaattgccgtccaacttcttactttatagatatagcatcaaggcaggaaccttttaggaaccaagttaagaatgtaacatacggataggtttgtttattatgcttatactagcggatccttggggacggcaataaggcgaagagggatcttctttggagtgacgagtccaggagcttccgacatgtccaaatccaccgggttcaagccgtcaggtaattcccagttgaagtgatacaggaggttggccagagcaatctcgatggtggccatggcgaagttgattccagggcacatccttcgtccagctccaaatgggatgaacaggaagtcattgcctctgtagtccacggcgttgtccatgaacctctcgggtttgaactcctctggtgcttcccaggacttgggatctctcgctatggcccaggcgttgacgataacccttgttttngccgggacatggtaaccctgcaacgagaagctgctcatggtctctc

SEQ ID NO: 4857 - DNA, 528 bp, Musa acuminata
  misc_feature (105)..(105): n = any nucleotide
  misc_feature (117)..(117): n = any nucleotide
  misc_feature (515)..(515): n = any nucleotide
cctttacctgctgaagtgacaactaggaaatacatgggagaacaacaaaggatatacatgatagcaatttataacagatactacgatctcttgctttttttcttntctcctgttgtnttgccacaataggcaattcaaaagaatttgatctatgacgtgcaaactttcacccaaaaccttcaagttgctttagaatagaagggaagcctgcattcatctggactgaagccgactctgtacggttgaccactaaaaaccattttcaggagacgacatgctgtatgtggtgtcgatcatcattatttgattacagatggcacaagtatcacttctctccatccattcaagaatgcaagacagatgaaaatggtgttcacactttgtcataattcgagggttctctgtgtcataatcttcgagacaaatggggcaagcgtcctcctcatctgtagttgaggtaacaggcttacttatctcatcttcagtagtcttaggagaattatgctcgctctgantttattcttgcgt

SEQ ID NO: 4858 - DNA, 759 bp, Musa acuminata
  misc_feature (94)..(94): n = any nucleotide
  misc_feature (146)..(146): n = any nucleotide
tatattctcatattctctaggtaacgaaattcaagcaactcactgctgctctaaagaacactgcacaaacaccatacagagagacatgtgcaanaaaatgagacagctgcactaaacaaggatcacacatgatacttttgggaaanagaagatacccatgtcacatgagaaaatcacaagaatggtcagcctagcaaattcagcttcgtggaggaacttgatatgattcttacaaaaagccaacgagcaaaagtgaattcaaaagtccagcctaacttgcagatggctcagctaatagaccagatctgttaccttcaggttgcacaccagaatgtaactgctccatctcctgaccagggaacacttcagactgcaaagatggagcaatgttgtttacatgaagccacgtcaactcccacaaactatcaccacctattgtgcttcttttcgcaagaataccttttgatttcatcatcaaaagagtgttcttgaggagttcaggaatcagttcttgcagtttatcgctcttcttacctctcactttcaccttcatatacttctccaaacgactgagtacccccagccacagcttgcagaaactactcagcccaaaaagatcttgccattgctgcaaaaacacctttgacagtaacttcatgggcatgcaaaagtgtgccctccatgttccggtaatctttctgggaatgattctgtgcaatctccagcaagtcatcaagcatagtaatataactagatcga

SEQ ID NO: 4859 - DNA, 585 bp, Musa acuminata
  misc_feature (6)..(9): n = any nucleotide
  misc_feature (11)..(11): n = any nucleotide
  misc_feature (15)..(15): n = any nucleotide
  misc_feature (552)..(552): n = any nucleotide
tatttnnnnangagnttctaccttcacttctgcaaggggtaacccagcagaagcagtatgaatggtgcacataagataactcacccatctaaaacaactaggaaatgttctactcatccatagctcttgataattccaaatcaattcctactgtcagttcctgacctgtatcggttttctcttctactttggtgttaatatttctcttggcatcatttgcctcatctgcgcttgatgacgcagctgctacacactcctggaaccggaagcagctgatgaggtggtcattcgtcagtccggaagactgcatgaaggagtatatgactgtcggacccacgctgcgaaaaccccttttaacgaggtctttgctgatgacatctgcttttggggtcttcacgggaacctgacgtggatagcgaaatttgctgacaatgggtttgtagttcacaaagctccagcagtatttatcgaatgatccaaactcatctgttatcttgagtatctgggcgtgcatttctcaatgatggctcggagctttggctctgacaaaanggagctagaagtgcttccaggcacttaaaatct

SEQ ID NO: 4860 - DNA, 544 bp, Musa acuminata
  misc_feature (4)..(4): n = any nucleotide
  misc_feature (21)..(21): n = any nucleotide
  misc_feature (115)..(143): n = any nucleotide
  misc_feature (222)..(222): n = any nucleotide
  misc_feature (447)..(447): n = any nucleotide
  misc_feature (481)..(481): n = any nucleotide
aagncatattccatggttgancacatcatgcatctccacaaccatactttgactgaaaccttcagtatgttgcatgccttgctcatacactgatacatccatgagctactggtannnnnnnnnnnnnnnnnnnnnnnnnnnnngctcgctcgctcttacacaagaggtccacccttgaggtattcagtgaaagccagtgccaccaagccgagcatggcgaanggccgttccagagctctgcatcggctgtcatcacgccactagacttggactgcacgctcacgcccttgaacaggggcaccaaggaggcagcagaaagcaaggcggcggtgcccgcgaaccacggcagcccgccattcgcgagctgagccaccaggtcgtcgcccctcgtgagctccaccgcgatggctgacacgaacccgatcatcgccaatcttccgttgatcntctccggtgccggcccactgaacgctaggatatncgagaagtcgtgtttccttgcgcttgggtgtcggtggaggagtctgcactggctgcggcggcg

SEQ ID NO: 4861 - DNA, 748 bp, Musa acuminata
  misc_feature (61)..(61): n = any nucleotide
  misc_feature (525)..(525): n = any nucleotide
  misc_feature (527)..(527): n = any nucleotide
  misc_feature (529)..(529): n = any nucleotide
  misc_feature (562)..(562): n = any nucleotide
  misc_feature (573)..(573): n = any nucleotide
  misc_feature (583)..(583): n = any nucleotide
  misc_feature (668)..(668): n = any nucleotide
  misc_feature (673)..(673): n = any nucleotide
  misc_feature (695)..(695): n = any nucleotide
  misc_feature (699)..(699): n = any nucleotide
taaatcttcttatgtggttgggttgacatttcattcaccaagaatggagtgcttgaaaganactctaaaagcgttaatctcatcgtatcatcgagattcccagattgagttctagtggacgcaagctaaagaggcagacggtgaaagttcgcatctaccaaatccttactctgagatttctgtttcccagaacaatacgaattctgaatcaccacagaagaatcgatcaacatgcgacgtaaatgagtatcaaccataataacagatgacttttcctccatggagatcgatgcagcctcagtggccatgttcaagaagccagggttgttcttgagcaactgtcaacggcacaaccgagaacatcacggtaatcccgggagatgatgaagtgatcgtagacccttccatcgctgctccttttgtactcgagtagcagcatcgaatggttgaaggctgtgagctttacgaacccgtagtcatggtcttgatagtaactccatctcgctcggaccgtggtgaagtcancnangctggcacctccacctccgacaactacatgtgnggttgcttcgnaggggccacngtaatagttcgatcccgttccgtatgcaggtgttctgatagacccgggcatgttctttcatagttgtgtacatgtcccaaaaagngcatntcaccttgtacttctggcaganttcntgaaggctttctcttcccataggctcctcagatgttccttcatcaccat

SEQ ID NO: 4862 - DNA, 382 bp, Musa acuminata
  misc_feature (10)..(10): n = any nucleotide
ctttaagcantgaattccttttcctccaagttcctatccaaagatcagtttgataccttttgtagttgacttgtcatacatatccttccggatgtcatcattctcttcattgtcatctgcttcctgtccaccattttctacatcactttcactagccgtttcccactcagaatcatcagcttctgggccatagacatctccagatccatcctcggtaggaatgcccccatgcttaatagctgcttctctgaataaccatgcagcatgcatctgcttcttcactaacctttcagcataatcaggaactttgttgtgccttaaagaaaggtcaggatcattagactgagagcactcattaatgaaaagaatggcatctaacaag

SEQ ID NO: 4863 - DNA, 485 bp, Musa acuminata
ttcatttacaagtttaccaacctttggcatatctacaggtctgccatttacataaaaatattgcctatctcctaaattacgaccactaccatatcgagacttagaaagaaagccttcaactttgcaaccctctgatacacataaattcagtggctctaagcactgcaaggtacttagaccaaatacagttatgatattatctttcaatgaactgcttccttgagttttcagtaccatggacttcgaattttttccagttgtatttgtgcaaagcaatcgaacacccttagcgattagggcatatgcattcaataaagaaacaagctttccgtattctcgtcgtatattccgactgaattccttacttcgcactggcaaagtggagaataacttctcaacggtcacagtggttccaacctgtcgtgcaatcttcttttcagtgtcactaaaccataatgatcaaagattaaatgtgtaccaagtgg

SEQ ID NO: 4864 - DNA, 587 bp, Musa acuminata
aattttaatgttgacaatttgcaatcatatatagtttataatcagatcagggtctcaacgtaggcctgacgtctcctcataatgttatcgtagaccacaagtagggtacaagatccattcgacaattctcacccctcaacttccaacatgggaaagagatgttccaatctcctccgtgctccacaagtggttgatgcaaaaaaaagtgaccaccatctttgacttgggtgtgtcctttaccataatctacaagcagccataagtagcttcagaaaccattagtcatcatgatcctcttctggcttatcttccttttgcttttgctgaggctctgactccccttgcagagatgccagcaaatctttcagcgaggggtcattaggatcaacacctgggagcgaatttaggatagaagaaacaaatgactggtcctccaacaccttactcatctcagattgagagacatgtctcttgcactgtcctgaacagacatttgaagggcatatgctaactcttgatcatctacagtagcatctgacatatctgtgtcaaccacaggtgcagtgccagactcagcaacatccatg

SEQ ID NO: 4865 - DNA, 576 bp, Musa acuminata
attagataatggatgagaaaaagttggatttttacaagtagtgttatctcaatgaggagacggcaaagaaagagcttccgatcccgactatttgtattgattataacaaacacaaggaaggataatatagaagaaacaaagaggagaaaaaaaatcaagaaaattacatcagtacattcttaaccaagcttcagagcctccctaaaaccaatgctgaagttactttgtaatccctttttgccaatgacagtagtatttcctttttgcatcattgccacgaattcgttgtaatctatgcgaccatcattatcttgatctgcttctctgatcatttcctctagccggacatcccccataccaaattcttcgcaagcctgttgcaactcgtccgcagttatataaccgcttccatctttatcaaaatattggaaggctgcaaataagtggtcctccttctctatcttgtttagatgtaatgtagcagcaataaactcatcataatctatagtaccactgttatcaacatctgctgcttgcataagtgcataaatttctgattccttaagttcggacgcg

SEQ ID NO: 4866 - DNA, 563 bp, Musa acuminata
  misc_feature (2)..(4): n = any nucleotide
  misc_feature (6)..(6): n = any nucleotide
  misc_feature (14)..(14): n = any nucleotide
  misc_feature (18)..(18): n = any nucleotide
  misc_feature (20)..(20): n = any nucleotide
  misc_feature (36)..(37): n = any nucleotide
  misc_feature (43)..(44): n = any nucleotide
  misc_feature (50)..(50): n = any nucleotide
  misc_feature (71)..(71): n = any nucleotide
  misc_feature (74)..(74): n = any nucleotide
  misc_feature (79)..(80): n = any nucleotide
  misc_feature (133)..(133): n = any nucleotide
  misc_feature (213)..(213): n = any nucleotide
  misc_feature (343)..(343): n = any nucleotide
  misc_feature (416)..(416): n = any nucleotide
  misc_feature (423)..(423): n = any nucleotide
  misc_feature (430)..(430): n = any nucleotide
  misc_feature (457)..(457): n = any nucleotide
  misc_feature (464)..(464): n = any nucleotide
  misc_feature (475)..(475): n = any nucleotide
  misc_feature (499)..(499): n = any nucleotide
  misc_feature (510)..(510): n = any nucleotide
  misc_feature (517)..(518): n = any nucleotide
  misc_feature (529)..(529): n = any nucleotide
  misc_feature (534)..(534): n = any nucleotide
  misc_feature (548)..(548): n = any nucleotide
annnantctgatantacntncatggataattacagnnaacaannatcctntggtttatttatctaaacctncanttgannaggttgttgttttggtaaaaagagccactcctaattaaattgaaatggcagancaatttagctgcctcattttcaacacccatttcttcgagaatgtaaatccacatgtggagttcaatattggcatccatgntattgtgacaaatacttagatattgcatctaatgactcattattttcttctgtgaaaccaatagaaaccttctgagagcaagcatggaaatccacgtatactttgagatcttctcctttatcatcagcantaaggcagagctcaaaacagttttcagaatctgagcctgcagacctttgaatatgccaggaaacccttctttnccccatntagaagntaaggcacccaccattgtcttgggggntttagantgtgtatcctngttggattcatcttcagtatcagnagattgaatcntaacttnncacctaatagntgggnaggtcacgatggtngctacgctctttgag

SEQ ID NO: 4867 - DNA, 413 bp, Musa acuminata
  misc_feature (135)..(135): n = any nucleotide
cctacatgtccattgataattattcttgggatgaaaataaatagtattctgaagtagccatcgctcacactatgatatcaggagctaattttccttgcttttggcgtctttgagctgccccctcttgcggatgtncatgcagaagcccaagcgccagtggtcgataaccgactctggtatggctgagagcagacaccaaatgagggaatggggccagtagggtgtgcatcttggttcatagcctatacaccgcaaagctgcacgggcataggtgtctggtgatggaacaaagaaggaagatctcctgatcgatgccatctttgtcgccacatataagggcacctggcattgcacatctattcccttgcccttatactcaacatacagacatctcgagaattgatcaatgtacg

SEQ ID NO: 4868 - DNA, 277 bp, Musa acuminata
  misc_feature (13)..(13): n = any nucleotide
  misc_feature (25)..(25): n = any nucleotide
  misc_feature (34)..(34): n = any nucleotide
  misc_feature (36)..(36): n = any nucleotide
  misc_feature (40)..(40): n = any nucleotide
  misc_feature (66)..(66): n = any nucleotide
  misc_feature (68)..(68): n = any nucleotide
  misc_feature (73)..(73): n = any nucleotide
  misc_feature (75)..(75): n = any nucleotide
  misc_feature (87)..(87): n = any nucleotide
  misc_feature (107)..(108): n = any nucleotide
  misc_feature (112)..(112): n = any nucleotide
  misc_feature (184)..(184): n = any nucleotide
  misc_feature (225)..(225): n = any nucleotide
  misc_feature (228)..(228): n = any nucleotide
  misc_feature (231)..(231): n = any nucleotide
  misc_feature (238)..(239): n = any nucleotide
  misc_feature (261)..(261): n = any nucleotide
ccttcatactttnttgcacaaacanattatacanangttngcagtcatttgtatccattactgcanantctananactccaggccanagcatcctcccatcatccanngtgncatattttgtgtctctgggctccattcgttcacaactgcagcacctgggtgtaccatccatttcatgtgaanggcagtacttctgcaaccagaaacgaagtgccctgtactcnatnaanccattcnnatttgtgggaataaattgttgnagacatcacattttgg

SEQ ID NO: 4869 - DNA, 744 bp, Musa acuminata
  misc_feature (14)..(14): n = any nucleotide
  misc_feature (77)..(77): n = any nucleotide
  misc_feature (80)..(80): n = any nucleotide
tgcttctttatttnggagagttgactgaccagaagacattattacaacaatgaatcagtaggaaaacaaaagcgcanaanaaatagctagtgacaaatagatgaatcacaccctctactagttcagctacttgtaaaagagaaattatgtacattattgcaattatccatcaagtaaatagaatatatgctctttctaaccccccctgggtggccttgatatcatgcatcagatccgttcttcctgatccattattctgctgataggtaacgctgactaagttcatactttctagcttaggccagaacgtagtgccaggcgaggtcatctctagtcaggtttcaagctgctggccagaaggattcacttatcaatttcttcaggaatgatggcctttcctaaagacaccagttgcatctctgccctccatatcatgtagcgaaattcaacacggatatgaggcacgtttgttttatggatatcatttccttcaggacctctcttatagtagctttttccaatccaatgcgacttgagagcatgtgaaaaaccagactgtaaaactgaattcctagcaatttcacataaatcacatgaacttagcttccaaactgaggctgcaatgctgtactcctccaccaaaggttcctttgttaggtggatttgcagaggatcatccgttgaaagtgaaacatttagacctcgaaggaagaatatcgggatgggttcgatgataatcaagaa

SEQ ID NO: 4870 - DNA, 490 bp, Musa acuminata
  misc_feature (2)..(2): n = any nucleotide
  misc_feature (478)..(478): n = any nucleotide
  misc_feature (483)..(483): n = any nucleotide
cnctgcatacaaactgttcttaacaactccattactgggaactctgatgaacatcaggttggtagacacagtagttttcatccttcatcagcttacaaaagcttttcctcagctaacccaaaaacagatctttgtcgagatgacaaaatgctcatagttttggtttctgtcgaacatatggaggccagtaaaaaccaaatgctcggattcacacatcaatgtacagggaattactcaggaacaaggatggttgcagttgcaaaacaagtcacaatttgcagcatagaacgggtctcctttcactcgttttcagcaatgtagtttggtagctcaccctggcaaaggtactcatcgcaatgggaagcagattcccagcctctacgaagtctaatgatatcctcggtgaatgttgaaacctgacgatccaataaaaacggtagacagaggcacaaattgtcttgtccagcatggcctcaanctganctatctc

SEQ ID NO: 4871 - DNA, 243 bp, Musa acuminata
  misc_feature (30)..(30): n = any nucleotide
  misc_feature (43)..(43): n = any nucleotide
  misc_feature (73)..(73): n = any nucleotide
  misc_feature (132)..(132): n = any nucleotide
  misc_feature (137)..(137): n = any nucleotide
  misc_feature (168)..(168): n = any nucleotide
cctatgaacaaaataataaacatcaaaggngtctgctcagccntcaattcccaccatcgcctcggacctccantacttggccttctcaaacccgttgatgcagtactggaagtcgtcgatggtccgatcganctccncgtcggtgttcatcacgaacggccccagttnggctaccggctcgcccagcggctccccgccgacgagcacgaaccggaggggcttcgcgacttgttccacacaaca

SEQ ID NO: 4872 - DNA, 632 bp, Musa acuminata
ccattatttaaaatccaagaacaataatttttagatgtgcatgaatcacaagctgtcactctggaatagaatagaatagaatagaatacttctcacaaaaatgtctggtagcactcagaaggatttcttttcgtatgaaaccaagccatggcactcctccctccgcctgtgcagctcctgttcggacctcgaatcttagcacctccgaacgtaacagatcatgagccgactccaaagatgatgcaccaagatcctgaaatccttgcttgacagcttgcatggtgtaaggaataaacttcaatatggagcctttgtcagctacagcaccaacaactccctgagcaaccttgagcttcagtgtgtcccccaagtagcgggcatcactaccctttgtcatagcttctaaagagcccatgccccgatacttcttgactcggcgaccattcagatactcataaacaccaggagcctcaccactaccagctagaaaactgcccatcatcacagtagaagcccctaaaaccaaagctttcacgatgtgtccagaatttggatcccaccatcagcaataacagggcacatcatggtctttgcaaaagatgcaaccttgtatactgctgttggctgtctct

SEQ ID NO: 4873 - DNA, 635 bp, Musa acuminata
  misc_feature (601)..(601): n = any nucleotide
ctagatataaaatccaatgtaacatcacagggtaacacaacataaacatgagttaccagaaagatgaacacttcagctgtagaactaatcttttccaaatctaaaagcacaaaatacattgcacagtttcatatcatcacatgaagccacggaacaacgatctggtctggattggctagcggtaaattccccaaccaaaatatcagcatcgtttttccatggaaatcacaatgacccatgtctcataagtccacaaatgccttaaccatcctatgaccgcaaatggtaatctacattgaaaccgcatggatcagatgggcttgcacctggtctcttatttatggtgcaatagtgaaagttgaggtttccagaattaatatcttcaatgtacattctcaaggtaacaatgattgatgaaaatgctagggaatcaaatggtatgtcatccaaagcaaaaagagcacattcgagtgactcagggcctggtgaaaaatgaggtgtcttcaatcttgctcggaatatgatgtaactttgggccaatgagaggaatatctaactgtgcaaatggtgaaatgatttcaacttcagcacatgcttcttnccgagtttctctagctgcccttctgcagcagatc

SEQ ID NO: 4874 - DNA, 702 bp, Musa acuminata
  misc_feature (649)..(649): n = any nucleotide
cagagatctacgatgtatataaagaaagaaaggtaaacaagctatcatgttgcattagaacatgatgtagctcacgggttaaataattggttcagttaaagggctcttactggtcgggtaaataacattagctaccgaaaaactaatctgttcctaccaagtttctttggctcttccagccaagaggaacaaatagaaggaacatagagctagttgcaacatagtctcattcaagcattaaggcctttatggagagtcatgcgggcaagcagatgtgattcagcacatgaaaattgccagggttcaattgtcatggaactcacttcagtttgagattgaccgagatatgcgtggcctcactggtgtcttcgaaggactcaccctgataggtagagctcccagaatcatgccactacaacccagagctgcgattgcactttctgcctgaacaaattcaacgaaagcaatacgtgtagagtgtatattatcaccgagaagtcgtagacgagaaacctcaccacagaaatgctcaaacaaagctttgacatctgtttgagttacctttttgtctatgtttgtacagtaaactgtccttatgaccatgtccctctcatcctcagacttaggaagaaactttggattcacaggnacaattgcagtctttgaaggcaagaccttgactggatagaaacccaagcacag

SEQ ID NO: 4875 - DNA, 635 bp, Musa acuminata
  misc_feature (577)..(577): n = any nucleotide
  misc_feature (599)..(599): n = any nucleotide
  misc_feature (604)..(605): n = any nucleotide
atcataacttcatatggatgaaaatgcttataagcttaaatagtacagaagcaaaagcttagtgcgtccaatatttcttatacacatttactcacttaaccgggcaataccttaaaagtaagtgggtgtgccgttcctgcatctccaccaatcactcaactttggtttgtattaattgatattagtacattatctttacttggtctaccatctttggttatcatccgcagatggttttgacaacaagcttcttcatagcgctactcttttcgtcatagaaatcccagttggatcaccaccccactcttcaaacgcaaccaacaagtttccagttgggttcagccaagcgcgaggaacatgataccatttttgagaaggctccccacaattagtctggcatttcttctggttgtatgtccctctgtaatcacaccaatcacaagaaccatatgccttataggcaggccagtatctgccaatgctttgtccattgatccatatctgacctttgcccatgctactcatgtctaatgccaatggctcgttcccagctggagcattaaagaaagccttgtanccaagtcaagggctgcttgttncgggnnccaccacttaactgaagaactgccactaag

SEQ ID NO: 4876 - DNA, 628 bp, Musa acuminata
  misc_feature (4)..(5): n = any nucleotide
  misc_feature (612)..(612): n = any nucleotide
gagnnaatgctcagcattcattcagaagtatttgagtacaaatcatggaaaaccatatgcaacttgcagtatgcagcttgatagaaatttgacagttgatacaaaataccagctgcaaacaccaaacatttagaaaaactatagaccctctcctgacacagcagaggtactcagtggagaagcattgctagaagaaatcaaattcaagatagttatcagatcctttctgattgattgcaggtgcagatttttggcttgttgatgcaataggctgtggggacctgtcgatctcgacaggtctcgggatttctggggggcttgcacaccgtatcaaggcccaatttacgccctcgaagaacggatgctgctttatctccgtagccccacgcttatatgcgagcctgtgctgtggctctttcacgagcagtccccttatcaggtccctggcagagaagctcacaattggggaatccggaaagcgcaatggctggccgatgacattgaacaatgtggccctattacctgatcccttgaatggagttttcccgtacaaaagctcatacagaaagatgccaaaggtccaccagtcgacggcactcccatgggcccttnaccttgatgatctcaa

SEQ ID NO: 4877 - DNA, 660 bp, Musa acuminata
  misc_feature (5)..(5): n = any nucleotide
  misc_feature (7)..(7): n = any nucleotide
  misc_feature (19)..(19): n = any nucleotide
  misc_feature (21)..(21): n = any nucleotide
  misc_feature (24)..(24): n = any nucleotide
  misc_feature (242)..(242): n = any nucleotide
aactntntccaggctatcngntcnattattccatccgattttaacccatggaatcaacatccattacaacccatgcacatgttcagtaatataattacacagacatcttggggaaaaagcagagcaacaagccgatacgacatacaaatatgtgaatcgaggtacatgaaacgctcaaatggcagcaacttcatagtctaaactaccacgggacgttccatatccaacacgatccttgtggnttcccaaacaatctgtccatcaatgtagtgctgtctacatacaggcatataaacatcagctccaccaattagttctgtttgtttttcctttgttttcctcaaggtaaagaatggcacgtccaccacacaactcacaccttgcggtaagcttggtaactgaattagctagcggaatgatgtcaagcaccgagccaaatctccttcttaggtagtcaccatccaagcctgcaacaataacagtcttcctatcacgatcagctgccattgcagcaaaaatcataaagatcttcaaagaactgggcttcatcaatccctatcacatccaacttatcatatgcttcgggctcctagtctttctcggaacatagaaagcgctgggcagagccatgcatgggcattctcgtaaccatcatgtgtc

SEQ ID NO: 4878 - DNA, 595 bp, Musa acuminata
  misc_feature (588)..(588): n = any nucleotide
tgaaatacgtgcgtagacatgcacacaaacagccttgctttccaagtagtataatactctgcgaagtgattagcatgtgaagatggtgggcttcccaggctctgtgatctccacggtgccctcaagcatcttggtcaccttccccatcgacggcctcatctccgctcggtcctgtaagcaccacatggctgtcttgagcattcgatccaccagctcgaagtgggcgcggttgtcataggaatccatgatgtggcgatcgaggatgtcctcgatcctctgctccacatacaccttctcgaacgcccacttgggcatgtaccagtcttcgctctccagcgacgaccgctggaactctgagctcctgaccccactcacgatctccagaagcaccacgccgaagctgtagacgtcggcctttgcggtgatcggctcccgttgaatcacccactccggcgccaggtagcctcgcgtccccctgattcgcgacatggtcaccttgtccttcttgttcgtcagttcgacaggcgaaattgacacttttgggagaagtcgtctcgatagtatgtctccggttatgtcgagtgaganccactga

SEQ ID NO: 4879 - DNA, 561 bp, Musa acuminata
  misc_feature (12)..(12): n = any nucleotide
tcttatcgtacngtacacgaaaaaacaaacactccgtagcatacacgaaagcaaattgaacaatgatccgtgcacagacgatttcacatttaaaaccttgtctgctccatgcacccaagcagtttcacccacagagcatcactgaaattgagatggatgcaaactctttgtgtgtccatgttgtggatttttgtgagacacagtgatcgcgatatcagcgaatgggttggggttggggcattggctctgacagccggaaccgcagtagtccgacgtggttccgcagtagccgtactggctgcagcactgcccgtcggggcacaacgctcccgctgcctgcgatccgcacagatacccggagtcattacagtacgcgaaagtgctcccgcaatagccatacttgctgcagcaaagcccatcgaggcacgtcttcccccctgccgccggtccacactgttgcgcgaggctgcccaacagtgaccccaagctaaagataaccacgaaagggagcttcattttccggcactccaagcagaagaggaggctcgccatatatagact

SEQ ID NO: 4880 - DNA, 519 bp, Musa acuminata
  misc_feature (14)..(14): n = any nucleotide
  misc_feature (498)..(498): n = any nucleotide
ctccacaaacaaantggcagcaacacaggcaggtttcagtggacacgagcacaacagtatccattttgaccaacgtgggtcgaccgcctctgaccaaacgcacacacgaaggttcccggatcctacttgtggtccctgggcccaccgaaaaacgcagacccttcgctatatatagaactcactccacgaccaagaaatcttcacaaccactagagatcttcttgtataaacatacataaagcaacgagggagagtgagatcaggaggaagatagagagcttacttttggcttccagttgagcgaagacacacttaccattagttagtccagcggagaagacgaccatggggaggacaagagacgccgaagcggagtcaatttgccgccggggttccggttccaccccacagacgaggagctcgttgtgcactatctctgccgcaagaccgcctgccagtgcctgcctgtgcccatcatcgccgagatcgatctctacnagtacgagccttgggaacttc

SEQ ID NO: 4881 - DNA, 651 bp, Musa acuminata
  misc_feature (4)..(5): n = any nucleotide
  misc_feature (17)..(17): n = any nucleotide
cacnngatgaatatatngggaagaataatgcgtacatttgtggattgacaacaaaggaatacatgtttagggaggataatgatcctatacacaaaaagaaagatggattattccatatatatcatatggacattgctcggtggatttggaagaagaatgtggtgctggctcatcttctctggaagttgaacaccttgatcgagaaggcgaagacgaaagcaaagagcacggtgaagccgaccactgcaacagccacgacgcccaggaagtcatgccggaacccgaagaatcgcctgacgtattcctccaccgactcaccaccctccattgtagtttggttgtcgccgaactgtgaggcaacgagcccatacagcgtccacgccaccgggcaagcccacgagtaccatctccaccacacagggatcctaggccgaggaatgagaaagccggcgaatatgttccagatcgcgtagaatgcggtggagacgatggcggcgatgtcgctgttcggcgtcatgggccaccgccatcatcccgtagaacgtgaagtacatgaaggtgaagaacatgaagaagaggtaccagaagaacttctccattgtccactcaaaaccaatcatactgtagacgatgagtccgtataacacagtc

SEQ ID NO: 4882 - DNA, 638 bp, Musa acuminata
acctaaatatttattgcaaacaatgtcttaaaaagcacaaacgtgacaatatgttaagcatctaaaaaacattaagtgcatgactttaaaatagataaaaagttctaaagtaaccacaagaaaaatgggatgcaggctggaaagtcctgcagagaggtcccaaggcaactgatgcaacaacaaagagcaacctgacattttcttaatactaggacaccttaaagcttgtcttcaaattcagagagaggggtcatctgttccttgaggcccttgcgctttctgatatcactcacaagctgccctgcctgagaacctggctccaacgggtcagacgacatcatgtcccagtgatcaaaaacacactgagggaatgcctgccccgatgttgccgccctcagagtgcttgagaaaccaaaagactcgataaccggaagatatgccttgatgttgtacaggggagttcctggcctctgcatctcctcaaagacatggcctctcttctggttgaggacaccatagatgccacccagtgcctgctctggagcctggatctcgaccaagtacactggttcaaggagtcttggcttagctgtcaattgagctgcatatatgacctcctggctgttggatcggacgcg

SEQ ID NO: 4883 - DNA, 585 bp, Musa acuminata
atcacaaacatgggtcttgatacatcagacaacattgattcaattaagcttttctacataaaagttgattcaaactaataggaattcagcagtcctaatgacaacaggatctctatagttaccgcctgcttgatatgctgaaggagctaaccttcatcggggtggccacaaccagaggagcctcgggagattcactaactgcaaacttctcgtgcatgaagcggctgtccacgattgattcatccttcgggacgaccttgtagcaatagcaactcttcagcccttcctggttcttgtagcactcgtggttgctgatctttacctgctggaagttccagatgacgctaaatttgccgacggtcgcaactaaatgcctctcctgcttaccattttcagtcacccatgaaaactgccccccatggaatttattgttctcgccagccagatgtgaatccaatggagtaagcttcagtaatcttggagcagcaatcctgttccccattcgcccagcaaaaccagtcttttcctttccatctttatccttaaataccgtgcttataaggatcaagtatgtatctgttgtgc

SEQ ID NO: 4884 - DNA, 774 bp, Musa acuminata
  misc_feature (771)..(771): n = any nucleotide
gttacccacgaattgctgtcgctatcaagataaagatatgcatttagtctgaagagtaaatctagtagtatgcatgtaaatatagtatatcacaaaattcttggactaaaacaggaaaaagagaatcaagtccagcttagaagcaaacaatatttgacttgggacttgtgttacctcaaggggtttagaattcagataaaagagtgtctggagaactcaatgccaatgtctgatacaccaagttctccactggaattctcctccataacatcctagtacaaataaatgccataaagtatgagataaaaggctgaaccaggactaaagcagcttctttctctcgaaaaatgtctttagatgccataactgcaagcctgccaccgaaagacagacggcaagtgaaaggaaacttagccaagccatcctagagttggtagatctgttcatgtcttgcatctgctcctccctttcacgcagatagaacatttcatcatggatggacttaatagtatcttccaacttcttcaactccaattccatgacatcgatctgccccttcttggcgacgttaggccagtccttggcagtgacgccggtccgccactcgaattccaccaccatggtggcaggcggcttgtgatcgggcgcccacaagcacgccaagtagtcgccttcctcgttcgatgtgaacgcgaagttgcccgagtccaccagatccgcgtagtggatgctattgccgtacggcgatgtcactctgaaggtgatcttgtngga

SEQ ID NO: 4885 - DNA, 596 bp, Musa acuminata
tatttatactgcttatttagcatcaagcattcacaaaatcttccctactaacaatccacacaggcgataagttgataccgtaacatagatatggaaggatcaaaaggtgaagggggtagatggcacattgcatcgataatgaaacacgttatttcttccgagccaccactgcagctattccacctaccagaagccccacagcagttgcagcaattcctatgccaatcacgccatctttagcaattcgatcctccactacctttctcagggtttgagcctgtctccagtctggtgcaatctctaaacatcggtccaagagttgacgacttcttgggtagtctccatttctgtaatacccaacagccagcagataaagtttctctcttgattgcagtggactagctgaattgtccaaggaagcttcaagcatggcaattccacgattcacatcttccggatgcctggaatgaacaagagcccaggacaacctcataaggctttcgttcttgctttctgcattcccactctctgcaacctctctttcacagccggcgatgatgtcgcgatcgcaccaggggatgttatcgccaccgctg

SEQ ID NO: 4886 - DNA, 1058 bp, Musa acuminata
  misc_feature (742)..(761): n = any nucleotide
ttatcactcttgaacatcatgtctatacacccattacacagaggagctctaagagttggaagagagtcgctatctctacctttcttgactcgatttaaacctgtccgaaacctacagataccatatggaaatccttaccgtagatgtttgaggactgcaactgctgctgtccttgctgattctgctgccaagtgcccagaccaacgagtacagattggctttcggtcttgatgtcatattgcagaggatgactttggctttggattgttgccgatgctgtaatggttccttgaaggtactctgaccatttgaggtcctcgtgttcccgttcgagctggacgtgggcgttcttttctggcgtcactccgagaaagggaggatgccaccgtcgaaggaggtgctgctttgcaactcgattacgctaccagtgttcatgctgctccggcgactgttactcaaataaacatcactgctgcactgaatagcatcaatttcatcacgtaaaagatcgatatttggtttcaggctcatcaaagctgagatgtttccgctgggaaccgatagcagaactgtggatatcgtgctgcaatttaactcctggttcatttcgaagagaggagcgcagtcaggggcaaagcctgactgtggaagaggggataagtggcagaccgatgagctctcatggtcgtggaagaagcctttggtcggcgtcaccgaattcttccatgttctgctctcgccnnnnnnnnnnnnnnnnnnnnccgggttgtgtaccgaatgcttggttttctccaaggttgtggcgggggctttgagatcaccggagttagaggtcttgtcttccaactctgcgagcggcttgtgagtgttggggtcgatgccactctgcctgagcttcttcttgacgcaggagttccagaagttcttgatctcgttgtcggtccttcctgttcccgagcactgcatggagttcaattatgagactctcctcctgctttgagaacgtccctctcttgagatcaggcctcaggtagtttatccacctcaacctgcagctc

SEQ ID NO: 4887 - DNA, 652 bp, Musa acuminata
  misc_feature (15)..(15): n = any nucleotide
gattaatggctttanttgcacacaagcaaagaacaactcgtgaataactacaataccatcatcggatttcagtggttcgttccatcaaattctactacagctcatcaggacatgcatgcaacacgaaacttcataagatcatgttttctgtctagaaaaatataaaccagatttaaaaagccaaggaaaacaccatttcctagcaacttttattaacttgcagggcctacaagaaccccctgcgcagaaccttctttttggttggtgtcctctttggtctcactgtcggctttctttatcttgatcttatacttcaattcaaactctgaaatctccttcttcttcctctccaatgcctcattgaggcgagcaatgacctcctcgagaccttccttgttgcgctgcacagcaggcaggacatccttgatcgtcctctcgaccagcacaccactgaccattcggtagcagcgacgtgatggatcaagtggttgtatggcaccgattacaagagagtgctcactgacttccatctctaactcagtgatctttgagtagatctggttaatttctgagcgcatgtttccatacgtgtttaaatttagatgagctatagatcgttttcttgtcacagagttacttttctcaaagaatc

SEQ ID NO: 4888 - DNA, 570 bp, Musa acuminata
  misc_feature (6)..(6): n = any nucleotide
  misc_feature (8)..(8): n = any nucleotide
  misc_feature (21)..(21): n = any nucleotide
aataantnatctcatctatancagaggcaacaagcatttgatacatcaaccacatggagtggggacgtgaccttattcagaaaggaaccttagccataaacaacaaccataaactgctgctacaacttcgaagagttcctacagtacagacacgcaaatactttgggaatgctggaaccaactctcgcatcaagtgaaccaaatccccatcccttcaaagctcaagttctcatttgctacaatggaagattccggtgggtgtacactacccctttatcaccatccacaacttgtccattacctctcaaaatccatcgagtggttaataatccttcgacaccaactgggcctcgagcatgaatcctacttgtacttatacccacctctgcaccaagtccaaaacgggctccatcacagaagcgtgtgctagcattgtgaaacactgcagcactgtcaacttgatggagaaagatctctgcagctgcaagatcctcggcgactatgcagtcagtatgtgcacttccatattgatgtatatgggcaattgcaccatgtatatcatcaactact

SEQ ID NO: 4889 - DNA, 612 bp, Musa acuminata
  misc_feature (85)..(85): n = any nucleotide
  misc_feature (509)..(509): n = any nucleotide
  misc_feature (529)..(561): n = any nucleotide
attaaacaatattcacaaactagagcaatcaatatggacaaggaaaaaagaaaacacatttgattcatctatactatcatacacnaaagacaagaaagatgtgctttacaagactgtaggtcagacttgatataaatctgatctcagacctcagaccatccagataacttcctctcttgtatatctctatctttatcttcttcctctatgcctcagttttgtgcctctggtatatgattctgacaagaaactcccctctctatcaaaaatgctgcagcatgccatgacaccagaggattaattctattaattcttccagtctccagaagaacacaaaaaaagatgaaacccttgtcagctgcataatctaatagtacaagccactgcttgagcccaatacctcagccttgctttaacttcatctggatgatcccctgggctggagattctccaattgggcgatgggaggagacgtcggcgacgcgcacagatccatggactcgccagangaggagcggtcgaacgagcnnnnnnnnnnnnnnnnnnnnnnnnnnnnnnnnnccaagaacctctgggtcatggagtagcagagctccaaagccgggagcgtgt

SEQ ID NO: 4890 - DNA, 711 bp, Musa acuminata
  misc_feature (5)..(6): n = any nucleotide
  misc_feature (30)..(30): n = any nucleotide
agctnnaagataccccagtgatgcggtatnataatggatttagaattcattcacagctagatgtcatttagtccataatctcagctcggatctgaaccaacaatgaccttataaaacctgttaactaatatggaggcaccaacgtattccgcatacaaggaaacctcaacgatgatgtttggtaatttatttggaaaattaaagtcaactccattattggaattcgtctgagggtacttcaccaagtgaaaacagatgtaaaaacatcaaatttaaaacaaaccaagtggtggtggaaaggcagcacagattcagcctacgcaatataagtcttacttcaagacccggcgaccttgaccaaacaagcagcaaccctaatcggaatcctttttggggccatggagctcgtgtgggcggttctccttgccccagccgacgccgcgggtggcttccaggtactgctggaccagatggcgacacttctggaggtggttgacgccctcgatgcggtagcaccatcggaggcgctccctgatgatcttggcggtctcgatctggataaacttctcccgcaccaagtactcccggtactctagcatcgccaccggatccccgtagggtttgttcggatcgaagtcgggagggctctcatcgaactccaccttcgccttccgcaccatctcttccttcctccgccctcgctcttctttt

SEQ ID NO: 4891 - DNA, 716 bp, Musa acuminata
  misc_feature (42)..(42): n = any nucleotide
  misc_feature (572)..(572): n = any nucleotide
  misc_feature (578)..(580): n = any nucleotide
  misc_feature (582)..(582): n = any nucleotide
  misc_feature (701)..(701): n = any nucleotide
  misc_feature (707)..(707): n = any nucleotide
cctaacaagaagaagccaagtgatgatatcatttatttcgcnaaacaatttcttgacgcatggcgtgtgctacattattactggaggaaaacaagtcatacattcatctcctattccttcgcttttgttgccaccaattcaatcaatcgtgtcacgttctcatacgaagaacctccctccatcatcgctttccgtgccttctctccaaattcttcagctctccttctcctctcttctccctcctgccctccgtccatcaacctctccacggccttagcgacttcctccctcgagatccgcgctccctcttccggcgattgcctcatctgctgcatggaggtcttgacgcccaccgcgactccgatcccgagcacatccaggatcaacttctcgttgaggaattgctccgagaagagcggccatgtcgccatcggtacgcccgcactcgcgctctccagcgtcgagttccacccgcagtgcgtcaagaaaccacccaccgccgggtgcgacaggatcatcacctgcggcgcccaccccctggatcaagagccctgtggagacaccgcctttcncgagcnnntntgcagccatcagatctggaatatctgagttgtagaataatgttagggggactactgctccatcagtaggagcattgcagtaatgtcatttgattcagatgctttgtggattgtttactnttcaanattgtcctc

SEQ ID NO: 4892 - DNA, 610 bp, Musa acuminata
actaaagtatcagataccattggccttgagaatgctgggaaatacctacaagagaagtacgggggagggctatttcctattctatatatttggggaattgggttattagcagctggacaaagtagcacgattactggaacttatgctggacagtttataatgggtggatttctcaatctccgtttgaagaaatggagcagatcattgatcactagaagcttcgcaattgtcccaactatagttgtttctctattctttgacacttatgattctgcattggatacccttaaccagtggttaaatgtcctccaatcagttcagatcccatttgtcctcattccgcttctcaccttggtgtcgaaggagcaagttatgggggtttttaagattggacctaccattcaagtaagttgtgaatcttaaatattgttatgaaattttcttattatcttattccgatgtgtttcttgtctgagccactattgttgccaattttttgttctcacacctgcaaatatccttctcttttcttttcttaattatttttgcattatactttttaacaatttagagtgtgggaagttcaagaacaaggtggaatattctattg

SEQ ID NO: 4893 - DNA, 623 bp, Musa acuminata
  misc_feature (10)..(11): n = any nucleotide
  misc_feature (13)..(13): n = any nucleotide
  misc_feature (586)..(586): n = any nucleotide
  misc_feature (600)..(600): n = any nucleotide
tgaataaatnntnataaatataaaacatatctcgacgacacgaggacagggccacaccacttttcctcacaaaataaaaccatttacggaaaatgatcaacaaactgtgaccctggatggtaaacagatactagctagtgaggtagcttataaaacagatggtagcttataaaacagatggtaaacgacagcttacatgcatccttcacttcagcacacagacccatcaagtcaccatgtaccgccataggaggaagcccgctgtaacatgaagaagcagcaaaatgagttcccatccgagacaatcttcaatgcaatcttgtcagctcctccactctcttgcaaagctcctccaatggaactcccatggaggatgctatctcgtccatccgactgcggctgagatcaaggaaagactcgatcaagtctccatccaagaagttcctggcatccactgtcttcttttcgttgttgaacgatcgccattgctcatggctcaggccacccaccccctttattaccttcacgaggttggctggagcttctcaaggaacacatattggtcatgaggaagggacgctaccancccaatgacaccantgatagtgccaaatataaccgtc

SEQ ID NO: 4894 - DNA, 649 bp, Musa acuminata
  misc_feature (7)..(7): n = any nucleotide
  misc_feature (10)..(11): n = any nucleotide
  misc_feature (17)..(17): n = any nucleotide
  misc_feature (19)..(19): n = any nucleotide
  misc_feature (22)..(22): n = any nucleotide
  misc_feature (25)..(25): n = any nucleotide
ctcgacngtnncgatangnggncancattcatgttagaacaaattagaaacaaaaaggcttattattgttgctatctttgcttcagttcaaacgccaacgtttggaaaaggtacaaatgtacaaacatcacaactcattttatgtaccagcaatgaacatttttcttcaactttaatgatgccagagaaattatgcggttaaaagagctaatcgatgccttcagtttttcttctttttcctggaactgtatcagttttgctgttgaagccatgcttgaattgcagaacgaaggccgtaattggggattagctcgtgatgagaaagcctgaggttcgtcatcggtgatgtgtctccgccaccacgaagccatccttcaatagcctcggcttcatatgtgaagccatctgctgcaatttgtggatccctcataatctccttaaatattggacagatgaagtaagatggaatgctgctgctgctgacttctgggactaatctaatcgatgaagttgataacctgacaaatgagacagacttcatcaagggctcgagtgtctccatggcctcttttgcatctggacggttcctcgtattcatctcacagcactttagacccagtttgccaacttctcggctgcacgtaaggca

SEQ ID NO: 4895 - DNA, 747 bp, Musa acuminata
gtagaattagctactatctaaattgtatctcaggaacattccatgatcaaataaaacaggaacacgaaacaacctttcggacagacgaacagctctcggtaaccgacattttttacagtctttcttgttaacatttcttcatcaccatcttttaatttacacccatataaaccttgtacaaacaactatcttctctgtgaagacatcatatatgtgctaacccatctgagcctcagccatggtgtgacaaactattagttcacctagagaatgtacaaacttcagtacaagcagcattattattgccaactaagcctgtaccagcctacacgcaaagccgggaagctcacactagcctcagctgtacaatgtcattctcatgcaatcgaagatgcatgctgggtctgaaatccgatccgccgttccccggctgcaacaagtttctctacacgagcaactatatgctttccgtaggtatattttttcaaagcattcaagtggacctttattcgtgacagaatcagttcacgttgctgatcatcacaagtctccaatactttctgtacaacatagttaccaaactgatctttcatcatggcctgaagaggtcattctcatcagttgaaccaagcatttcattcaccaatatttgacgttcctcgagactgccaaaagtcaaacatttttcaacaacattcgaagcaaacttatgtagactcatctgaactatctgtccggctaacttct

SEQ ID NO: 4896 - DNA, 644 bp, Musa acuminata
  misc_feature (598)..(598): n = any nucleotide
  misc_feature (608)..(608): n = any nucleotide
ctatttccatcacaaattgctgatatgaaaacagatgcgagtatttggcgatgagaatctaaacatcggtcaaaattaatgatgatacaatcataacataggcaaggaagaacaagagagcgatctgcatgaaaaactttgggttgtccctcaagcttggagctgcaactgcccttgcaatacgttgagaaagtcgagggagaggtaaactctgaataaacacaactccaggacctgatagtgtggccatcaattggttgtcacccccaaagaccactcttctcattggatgggagtgcttcagctgaaaattgatagtgcatgtcatagcaacaatacacacagcatctactattaatacttctccaggagcaagaattttctgcacgacagatccacatcccacaagaaatgcaagaccctggcctactagcttctgtttcaggatcacctctgcaccaacctcaaagttgcggggtctttgatcaacattactgatagttctaacatcattgacagagcaaagaaatgcatctggctgacaaagaatctcaccaccaaaatttgccagtcaatcggagttcttgcagggatggtntgcattccancaatcatcttctgggcaagatgcgagaactatgttg

SEQ ID NO: 4897 - DNA, 445 bp, Musa acuminata
  misc_feature (11)..(11): n = any nucleotide
  misc_feature (13)..(13): n = any nucleotide
  misc_feature (16)..(16): n = any nucleotide
  misc_feature (132)..(132): n = any nucleotide
  misc_feature (225)..(225): n = any nucleotide
  misc_feature (394)..(394): n = any nucleotide
atggcattagntntantatatcctggataatcactaacagcaaatcagcagcagcctcagaagatgaaatcttggacaagagtaaaacatgctaatggagactacagataagttaaggtaatggagaaacanttggctgtagaatccgatttcctgatctcaaaataccagtcagaggtgacaaaccttgtctaatcatgcacttatccataatgctacaatagncatattttaatggataagctagaattccagtttggcaaacatggttgatggtgactctgtaaaggtgggtaaatactggagccaatctttcgcacaaaagagagcctccactgtctctggacgtaaggaactccgatactcatcaagtactctgcttccagtccctganccaaaaatggaacatcctgtacccacaatggacactggaatgcctaatatg

SEQ ID NO: 4898 - DNA, 648 bp, Musa acuminata
attagatctagtcataagaatagtagactttacttgaaccatcatctaccagaaacaacgcacagtttgaaatcaaaaacatctcttagatatcgaaaaagcaaaggtagtagtgcaagatgacgacataactatagtaggtaggtgatgaaggacggaccgatcgggctaatcgttggagggattgatgagatcaatcgatctcctggagagagggcgcaccggcaacggcggcggcgacctcctcggccgagaacttgcctttggccttgtcggcggcccggccgcgggctttgcggtcgaggagggccttgcggtccttgtccagctttagcttcgttatgacgaccttggaggggttgatgccgacgttgacggtggcgccattcaccttctcgcgggtgatgcgctcgacgtggatgacccacttccggcggtatacctgcacgaccttgccctcacggcccttgaaggtgccccgcaccacctgcacctcgtcgtccttgcgcacgggaaccgaccgcacattgtacttgttgcggaggtccgctgagagcggagcgcttcatcagcacccgccggacgctcgacggggcagtgaagtgcgccttccgggacttcctccgggaactcgacacgcgcgcggac

SEQ ID NO: 4899 - DNA, 657 bp, Musa acuminata
ttgaatatggtaatatcaatgttgcagattgtacaagggagtcgagtaaatgaaggaaagcagccgaatagattttgtgaatctggattctcctatttcaaaataagacattcggaatgtaaaatatagctgcatatacaacaggattaggaaaaaggtactggattctcttgaggcttcttccatgattcaattaggaaaaaggtactgaacaggctgaagctttgtcaaccaatcactggcatggttcataacttgaaggtcacagaacggaaatctcctgtgcactttgtgatggcctcattagctttctgagttcccgatttttcttctctcttctttttttctctgtccacatattccttcaaaagctcctttgcttgaactaatttcgacagaagattgcgatacacatcaagatctctatccacactgcgtttatttatattcagtgcagcacaaagcttttccaagactgtaggttcagttgcatttgccagctcaagtagacggaacagtccaatcgcaaagaatcgactgtagctgaagtttcccttactcagtgcccgctctgagatatctttcaaaatggtctctacttctccttctctagtggagaactctattaatgaattagcagtctgagcacgagcccac

SEQ ID NO: 4900 - DNA, 681 bp, Musa acuminata
  misc_feature (13)..(14): n = any nucleotide
cattaaattattnncagaacaatataggcactaagagatttacaaatgacaacaatgatgacgagttcaatagaatttttgacatccttttctatgatttgtgtaacataacttaaccgtgtaatggcaccatgcttaacataaaaaacgaaaaatgaggaaaagaaaactgtgcaaactctagaatcgctactcacaaatatgctggttagtacccttcctatcaggtgtatctccaagcaaccagagcacctattaagatgagtgtatataactaagagaaccaaatgtagaagtggttgatatctgggggatattaggttagccagtgaccaaaactgtgtgtgaaggaatcaagggcgaggctagaccctgaacagataatttaggtcctccaatgtcaagcgagtttggccagcaccagattcatcttctccaaatgcggaagcaaccatctcccttttcttttcctggagagccaagatgcggtcttccactgtgtccttcactgtcaagcgtgaaacagtcacaggacgagtctggccaattctgtgtgctctatcaattgcctggtcctcagtagtaggattccaccataagtctagaagaagaacatgacaggctaccaccaaattcagaccaagacttgcggctttcagagacataatcattacagtaacc

SEQ ID NO: 4901 - DNA, 615 bp, Musa acuminata
atgcaagataactacttgattgtagacaaaccattttaagcaatcaaatacagatatcaaaagaggatgtccgcatggctatagtaaccacaatccacacaaaaatctaaactttaagcgatataatccttaaaagggaacttgttttcggaaaagatcgagcccgttgtgccaagatcccgtctcagttcctgcggccagcgccataaccgccgccggggcgcgactggtacgggtaagtaggggcggagggcgcatcggcttgctgctcgacgccggggatatcggtcataccaagggacgcgagcatgtcgaccgtatccttgtcgacctcgatgtggtcgaccttgatggcggactcgtcggggacgaagtcaatgcggcgctcgcgctcctcctcctggagcttaagggagatgccgcggacagggccgcgctggatgcggcgcatgaggtgggtagagaatccggcgatcttattgcggaggcgcttcgaggggatgatggccacctcctccagcatcttcttgttggtgtggaaatccagggtcatccgcgagtagtaccgctcgatgacctggcgcgacgacttcttaccgtcttcgtccggacgcg

SEQ ID NO: 4902 - DNA, 574 bp, Musa acuminata
  misc_feature (556)..(556): n = any nucleotide
attataacattttccagacgaatactcgcatttttctgcatttgtgggaaaaataaatggacatactatgaactaactacgagtgctacagcaaaggcataaaaagttgctgctaagtgcataatatatatacacacctgaaaggggaaatcgaaaaccagaaagagaaacaagggattcattcaccgatctgatgtggagcagttgattgcatcggtcttgatcacccttgtgttgtacgaaccacaaaagccacatttgtggtaaagccagtggaagtgagatgtgccctttttaccacagtcattacatagtatgtcctgacaccgatcccagtactcctcaggaagctcttcagcagccaataaagcatcaagcatgccgaagtatacagccatgtctcccaaggatttgctgcaaattgggcatatgtaatgactgcaagtataggcttggaagcatgctgagtgcatgaaatgtccacacggcaaagctctgactgcttcacttgatgtaaatagaaaatcacaacaaattgggcaatttgctctagacntttctcacgacatttgtg

SEQ ID NO: 4903 - DNA, 622 bp, Musa acuminata
  misc_feature (12)..(12): n = any nucleotide
  misc_feature (593)..(593): n = any nucleotide
caaataattaantgtcaattatgaataaccatgaaacatctgtcttttccaaacagttcagaaattgctcagagtcgctaaatatgaattaaacaaaaggccgactggtctcatctagaaactcaaagtaaagcattacgatcgaggtttctccttcttttccttgaacagtgccaaaagggagacaccagacaccttcacaaccttaaaccttactccaggaatatcaccgactgcatgacccttacgaccgaaccctgcaatcaacacttcatcattttcttctatgaaatttaagcaaccatcatttggaacaaaggccgcaattttcttcccattctttatcagctgaactctagcacactttcggatagcagagtttggctgcttagcttcaatacctatcttctcaaggacgatacccttggcatgtgaagaaccagcgaagggtttcttccactcattgccaaggtgacttttcttgtacgctttgtctgcccatctctgcctcctcctgtgagttttgagcttacgcccagctcccataccacgagtcttccccatcttgttggaaaccgaagctcgccttcctntcgcgctctgtgcgaccgcgggctgcgac

SEQ ID NO: 4904 - DNA, 1050 bp, Musa acuminata
  misc_feature (40)..(40): n = any nucleotide
  misc_feature (42)..(42): n = any nucleotide
  misc_feature (87)..(87): n = any nucleotide
  misc_feature (99)..(99): n = any nucleotide
  misc_feature (201)..(201): n = any nucleotide
  misc_feature (205)..(205): n = any nucleotide
  misc_feature (350)..(350): n = any nucleotide
  misc_feature (489)..(517): n = any nucleotide
cgtgtacgtgttcactctcatcccatgtacggggagttcntntgacgcagagacgtgaagatcccgccggcggggaagatctacgcnttcaacgagggnaactacctgctgtgtgacgacaagtttcgggcgtacatggactccctcaaggatcccgggcccaacgggaagccctactccgcgcgctacatcgggagcttnttgngcgacttccaccgcacgctgctctacgggggcatatacgggtacccccgggacaagaagagcaagaacgggaagctacggctgctgtacgagtgcgcacccatgagcttcatcgtcgagcaggccggcggcaagggttccgatgnccaccagaggatcctcgacatcgaacctcaagaaatccatcaaagagttcctctgttcattgggagcgtcgaagaagtggagaagttggagaagttcttggcgtgatgactgcgaactcaaacaagaatcatccgccannnnnnnnnnnnnnnnnnnnnnnnnnnnnccgaaggaatttgttctgagaaaggagaacctgtaacacctaccattgttggaagttgcactgtgaagcacaaattgttggatggatatacagcttcaatttcttgtttttgtcctcgaatctctaattacaatttggtcttgtatctctaaatctggctcaagcactcctcctacataggattcgaatccaagaaggattggctagctaatccgggcagcatctgacaaggacagaaacaaagaatccatctccttccacagaaaagcaaagagagaggtccacccgagcagcacgatgttgaggtgactactgcagaacttagattgcactcgcgagagacgattggtggcggccgatgttgctggagctgatttgaaatgatcgattcagagcagcaacgaaaccaaaaaagaagatgaaatcgattgatgaagaatgctgcagacagattaatgttgatttgatggtgcaaggaaccaaaactgtattatgatagctactatatctctatgccaactgctagcatttgc

SEQ ID NO: 4905 - DNA, 677 bp, Musa acuminata
  misc_feature (636)..(636): n = any nucleotide
  misc_feature (640)..(640): n = any nucleotide
  misc_feature (652)..(652): n = any nucleotide
aaaatgttccttgggtctattctacagatatatggaaagattaaaacttatatctacttatggacccccagagtaattccaaaatttagacatgattttgtttcattcaatccccagcatctgatatgaaaaaccaaaaaggataaatattccggatcgaaatgaatcatatctttgttttgatttgacagactcacttctcatttcaacaaagaccactaaaaatttcaatcaaatttgatttgcctaaacgtattgtcttccatctgctctgcaataggaatggatgcgtcccaagtatatgctcaggcataaaatcgtgccttgtcaatatgcccacaacaggtgcccgcgaagaagactttggaataaccaagaggtgcctcaagccaacttctcggaaaagaatgagagcctttgcaagtgacatcgtctcaacaacagtgtaaggtgaagtgttggtatacggatgcaagtcaacatacatgtccatctcttcagcagtcaggtcgatcccttcaatgttttcatgcttgccggagccacgtttagcaaagtcctcgggctgaaaactgttttgaaacatcaatacttacaagtgtgcgagcatgaagaaatgttttcttcttcaacagnccangtaggtgtgccncagaatcagaccaaaagcactggtg

SEQ ID NO: 4906 - DNA, 654 bp, Musa acuminata
  misc_feature (627)..(627): n = any nucleotide
  misc_feature (634)..(634): n = any nucleotide
gtattgtggcaataagatacattttcaaagtaataacactgattgaacaacatccatttttccaatgtcaaaactcttgatgataattatcccagttggtggaattctttgtttccaaggtgtttgctgtacatggatgcaaagtaatgatagggcaccgggaagagcaatcaaatactaccctggttttttcctttaggatcaggacaggggattataccccatttcctgcgcacatcctccaggttctcgtgaaagtgcttctcgtagtacacagacatcagatctgtgcacgccacacctgccttaacagcccaaggaagatagtgttggaaaaagagtgccctttgctttctgctgaaccgtaatgagcctccgatgaccgacaaggcacacatcggaacaaacatttgctcaaactcgatcaccttaagagcagactcacctatcaagtttgtgggaaggccaaatagcacatgccagaagtcatgcacctcacgagcacgtgtggccacgtatgccagtcatctgtgtccatgaatcgaactggtgggcggtcatctggggagaagttcttgatcccatgaatgtgcataagtgagccaaatgtgctttcggtaagtccangcatgtncattgtgcgataccacatgt

SEQ ID NO: 4907 - DNA, 612 bp, Musa acuminata
  misc_feature (553)..(553): n = any nucleotide
aggactcttttacaagacttgtttgcatacagcgttcttattccagtactatactctgcttgttcactcaacaatttggatatcatcaagtttgcagagtccccagttgaattgtgggaggatcaaaagcaggttaatggctttacagttcacatgctacattcacaaattccatttgaagccaaaacactagagaacaactatattcatgaacttcctctttgcgaaagctagccaccacttgttaggggtgccattaggcctataagcacagttaagcagccttccacttgtctcctctcttatctgcttcaaatagttcctgaatagttctgcttcatcctgagaccgtggaacggaaaaaagaccaggaaaaggaaaacctggctctccaggcacaggaaccttctctaggcccaaattaatgatagctttgggtccccacagcaagagttctgcaaccctccagccgtttcagagccacattgatgtagaatgtcaagtagataaggagcttgtcagctgggctcttgatgtcaaaatttttaaaganaacatttgctcgaaagaaagttattgctcatcaacaatgtcgattttgtcttgatctga

SEQ ID NO: 4908 - DNA, 1199 bp, Musa acuminata
ggccgtcgtcgacgagatcggactgagcgagtggggttacgcctgtcgccctttgcagactaccacggttgctgggactccgaccctgaggtttcggggctctacctcgtccaccagatcaacaagcatggccttctctacttgcatatggtggagccgaggatgtccattgtggaaggcaggcgccaaatcccccaccggcttctgccgatgaggagagctttcaagggaaccttcatcgctgtcggcggatacgaccgtgaggaaggcaacaaagtggtggcggagggctacacggatctggtggcttatggtcgcctcttcatctccaaccccgacttgccgaggaggttcgagctcgacgcgcctctgaacgggtataacaggctcaccttctatacttctgatccagtggaggggtacacagattacccatttctttgaccttcggccctgagactatctcaactgagttgactttgaatcttgagccaataattctttgtgatggcattgtcatgatgcattatcgacactaaaaacaagcttgaacattctgtaatgaattagaggcttcggaaaagaagtgaggtcttatgtgtagacaagctacaattcatttagaatctccaaacatttaatgtgctgattaagtatactgaattaattgtccatatcaaatgaaaaatgccacgaaaactggattttaactgcaacagctgctcttctgctcgatgggttgacccttcatctgaacagtggtaggtttggtatctgcagtgtgttggtttcccattcttttcttaatttcagcacacatggttaagaaagctttctccacattgattgaatcctttgcactcgtctcaatgaaaggaataccaagtgaatcagcaaatgcctttgccttttcagtttccacaactctgtcctcaaccaaatcacatttgtttccaacaagaagcttgcacacactgtcactagcatatctgtcaatctcacttagccactgcttgatattgttgaaactttccatctctgtaatgtcataaacaataatgatcccatgtgctccacggtaataactgctggttatggtcctgaaccgttcctgtctgctgtatcccacttcaagcaaacaagatcattgcctcaaaatgattgcactagactataacaaaaaatagcatactagttct

SEQ ID NO: 4909 - DNA, 591 bp, Musa acuminata
  misc_feature (556)..(556): n = any nucleotide
taaaaataacaagtgcaaacagcgaggaatcagattcggcaagatacctgagcagtacggtgtctatcggagaaactattcatggaagtatatgatctaactgcgacagacttcatgtaaatatgatataaataaaaaaagaaaagaaaaaaaagacaacgttttaacaaacgttacagctcctcctacaaaagccggccaaatctgcagttccaaccatgtactctggattctttgtgcactctccaagtgcagcccacctctcgcaactttcgttctcgtctgtacagtttccttgacttgtgataatcttgtcaaaggaggctacgtgaatccactttgtggccgaccatttctcaccttctatcactggggcaccctgcgtgaaggctgccttgatctgtagtagcatctggatgaaggctgaagaacagaagagcattccctcgcttcggcttaactgcttttcctcgctgggcacattgctgaaaagctatcatccttggcatcttcaccacggtgccgaggttcctcagctgaaggaaacacagttcancacctttgggcagtctgttagtacataagacagta

SEQ ID NO: 4910 - DNA, 553 bp, Musa acuminata
  misc_feature (18)..(18): n = any nucleotide
  misc_feature (20)..(20): n = any nucleotide
  misc_feature (48)..(48): n = any nucleotide
  misc_feature (524)..(525): n = any nucleotide
  misc_feature (527)..(527): n = any nucleotide
  misc_feature (530)..(530): n = any nucleotide
  misc_feature (545)..(545): n = any nucleotide
ggtcttttatctttcctnangggattggtgtagggtttctttgttgtnaccggttaatcggactaaagattcgagggttgctcggatttgtgggagaatgggagggaagcttgtgtggctccgggtggtgtgggtttcggttcttctttggggatcttgttgggggaagttcgtggtggagaagaacagcttgaaggtgacctcgccggattcgttgaagggcatctacgagtgcgcaattggaaacttcggggttcctcagtacggtgggactatggtggggatcgtggcgtaccccaaggccaatcggaagggttgccagagcttcgacaatttcgacatctcttataaatccaaaccaggagggttccccacctttcttcttgtcgacagagggggtgagtcttaatgttatgagccctagaaaaaaaatcgtgtgtgttttatctatgtgtttggactctttcaaatcttgtcaaatgtagtgatttttctttgtgtgcatgcatcttcttttactgttnncntcnttgatttgtaatgcntaaatatt

SEQ ID NO: 4911 - DNA, 618 bp, Musa acuminata
  misc_feature (607)..(609): n = any nucleotide
aagtagagagtccattattctttgtaatttgaagcctacttttacatatgactgacacattatgccaaaatcttaagtaacaagatttttcacgctgaactaactgcaggacgaaattactgtgtttgagcaactcgaaggacttacaattcatctttgacatccgcaccgccactgttctcaccagcagaagcagatccatcagaggcctcagttttcaggactgatgccggcctctggagcttgaatgggatcgatgcatgcttcttaatgaaattgtagaacgccttcactgttctatctgcatccactgtgatcggttcaaaactcttgtttccagctggaaagaaaagaagtgtagggaaaccatcagccttggcccgagggtgctcatttgtggtaccatccattttcgctatcaccagagactcaatgccccgaagatgtttggcaagcttgttgtatgttggctctaatgcttggcaatgcccacaccatggtgcatatatctcaagaagaacatcctttgattcatccaaaacaatctcatcaaaattatttccaacaatgattttcacatccccatcatttgtctcaggtaacggannngaaatgtag

SEQ ID NO: 4912 - DNA, 546 bp, Musa acuminata
  misc_feature (5)..(5): n = any nucleotide
  misc_feature (448)..(448): n = any nucleotide
  misc_feature (470)..(470): n = any nucleotide
  misc_feature (482)..(482): n = any nucleotide
aatgncaaaacatattatctagcaaactcgatagggaacatgaggttcaactctgaaggaagagatttgttcttgataaagcaataaaaactaaatgccatacatagttaatactaccgagaaaacatcccataacccaagtggaaaataagtaccaattgctagagaatcaagggagacaaagctgctctcaagtattggtggctctagtgtagatttgttggcttgcatgagcagacaccatccgaatagcaccccttgccataagatcctttatggccctccttgctagtgatccattaatccgcaatcgctcggacagcacggaaggggtaatctgcttgtacttgggaacttcagacagcatcttatcgtagttcgcctggtcaaagaggaccgcgttgtttaccttctccttctgcttccccttgctccacttcttcttctnctgcttgcctccaccagatttngccggcttcgangacggggcggaccttgtccttcttgggcgccatctccctggatccaaacgcggagaagaaagac

SEQ ID NO: 4913 - DNA, 561 bp, Musa acuminata
  misc_feature (555)..(555): n = any nucleotide
tcagatcaaacgaagacgaacaggaaaaagagatcatatgatcgagaagcagaacctcgcaagcctcatctttgaacaagtatgagtggtataactaagatattaagtggaatctaagcgtaggtgatagatagcaagcaaagataaggctgtggcttagtgtgcttgctatgcccttaaacccctaccaaaccccttccaccgatcacgatcgagctgtgtcctcagtctttgagcttgaaggatgatccggtggcgtcaggcttgcatggctgagcctcgatcaggagctggaccacctcgttcatggttggacgaagagttgggttgctgcaggtgcagcgaatggcgatcctgagtacctgcaccagctcctctttcattgggttccatgagatctgcttgtccagtacctccattgcaccttccttggtgcacatcttgctcgatacccagtggatgatgtctctgctctccccgaactccggctcgatcggcttctttcctgtgaccagctccatcagcaccacaccgaagctgtacacatcgcacttngtagtg

SEQ ID NO: 4914 - DNA, 497 bp, Musa acuminata
  misc_feature (16)..(16): n = any nucleotide
  misc_feature (180)..(180): n = any nucleotide
  misc_feature (341)..(341): n = any nucleotide
  misc_feature (460)..(460): n = any nucleotide
  misc_feature (487)..(487): n = any nucleotide
taaactcacataagtnaacattcatgtccacatagcttcacaacatttgtgacgcatggatcaaattcatgggaacagttcaattagggtgcaataagcaaaacttagctgtataaggagtgcatggtaatgttagtacaacaacattttcgactgaaggtgataatatatatatctctnacgtgctgttatgttactcatttgcgatgtctatatagcctatttgatcccaactaaggagaagaggggaaaccttcactcggaagccactagagttcacctgtgatcacttgaagctcttggtttccccttgcttatggaattcaggtgttgggagacgnaaatgactacaataacaacgatcaagcaacctacaagggtgctgaaaaagagcgctccaggctgcctggtctgtacatatccataaaccccaccagaagttaccagaataatgtcagtnaggccgtcattggagaagtcttctaanaccaaggcgt

SEQ ID NO: 4915 - DNA, 555 bp, Musa acuminata
tcttatctgtacctttatcccatagattcagtgatctgtgaacatagatttgtccgaaccaagtgagaggaagctaaccttagtttccactacctagactttctttgtgtatgtctatataggagcaaattaacagttagacaaaaaaaggcaattacattaatattctactaatacaaaaaaatatatatcgaatgatctggaactaatttcatttcttggggaattccagctgataactcccacctcgagtgtggaaattgtaggcgtcgatcgctctacgatgacaatgagatctcatcctcgtcagagccttctggtctcaatgcatgaaacctcgggaacacaggtggtagggttgggttcaccggcaccggaaactgctgtgccaaactgatgatggtgcgttcgtttatccttccgacctccttgcagacacgatcaagcacgggccagaaaatctctgaccaccatgaaaatcctgaagggatgtgcttcttccttggcggagttaccatggaaatactcggttatctccttcaacaagagacaagt

SEQ ID NO: 4916 - DNA, 517 bp, Musa acuminata
  misc_feature (5)..(5): n = any nucleotide
  misc_feature (16)..(16): n = any nucleotide
  misc_feature (23)..(23): n = any nucleotide
  misc_feature (26)..(26): n = any nucleotide
  misc_feature (48)..(48): n = any nucleotide
  misc_feature (101)..(101): n = any nucleotide
  misc_feature (115)..(115): n = any nucleotide
  misc_feature (167)..(167): n = any nucleotide
  misc_feature (209)..(209): n = any nucleotide
  misc_feature (326)..(326): n = any nucleotide
  misc_feature (394)..(394): n = any nucleotide
  misc_feature (466)..(466): n = any nucleotide
  misc_feature (479)..(479): n = any nucleotide
  misc_feature (492)..(492): n = any nucleotide
  misc_feature (497)..(497): n = any nucleotide
  misc_feature (504)..(505): n = any nucleotide
acttntactttttaangatcgancangcgaaacgatttcacataggcntaaacttaatttcatccaaaattatcaactaatagaagaaaaaacaaggctangtcgacaaaacctnacaactaacaccactaaacgccaagatagcatatggtagggttgacagtggngtcatactattatctgactcagatactgtcatgagagaatcntaagctaatcataactataagctcagaattgcaagtgtcatagggaagagtagtttgccatggcgagagaggaagcagccagagtcattgaagctggggagggctcttcttggccangtggtgcttgttgttgtgcatccacaccttgaggactctccttctgactccaatctcctggcagagtngctgcactgcactctccgtcctgcttctgaagcctccagccgaccttctcagcgaacgacgagcatcttctncttctgctccggngtgaacttggtcntcagnctcttcnngaccagaatcgg

SEQ ID NO: 4917 - DNA, 609 bp, Musa acuminata
  misc_feature (604)..(604): n = any nucleotide
aaaaatctggatttaagtttcaatcgatgtagaattgattgtttatttgtccccaaagtacagtaaagatgattgattctctgaggggagagagagaattatgtctccgtggttgcaggattatgtctccgttcagcaatcacagaggtggatttcctctgcttttggatgatccaacgtcgtcttgccacaacagatgcatttccgcgtcgtcgtctcgtccgacatcgttcccgcttccatggggcgccaatctgcgtgaagagccgtcttcctcctcctgaggacgccgcaactccgcgtggccgcttcatgagcctgctcagtgccctgagctccaccgccaactccttcatggtcggcctctccgacgattccagggccacgcaagtcttcgcgacctgagctatcgccagcaactgcatcgccccggcctcctccaccagcctcgcatccaccagattaagaaggttgttctccttcaggtacgtgtagaaatgtgccaccaggttcctcgccgtctccgatctgcaaaacgatatcggcttctccgaagtcagcagcttccagcagaaccaccccgaagctatacacgtcgctcttnttcgt

SEQ ID NO: 4918 - DNA, 460 bp, Musa acuminata
ctgaataacttaaaattcaaattcttttacagaagtttcaggaaaactgggccagaagttcaacaagtgaagcatcgatttccacgaggaatcacaacatgaccattgaacatcttaataagctacgtacaggtgtcatccaacgtgctcataaagccacctataaaaccagcgccattgcagtttccacataagatgtccttcttacctctgcaaagccaacacagtgctccagctttaaattgcccattgaagtgatcgacagaattcacaccagtgcctttgcattgtgtgcacaattttgcaccattcccctcacaatcagcacatatgaggcttttcagtttcgtggccttattagaatcactctctgtagccttagccttattagaatcactctctgtggccttagccttgagagattgaaagctagggttgacaccacgggagatggggtttg

SEQ ID NO: 4919 - DNA, 529 bp, Musa acuminata
  misc_feature (491)..(492): n = any nucleotide
  misc_feature (503)..(503): n = any nucleotide
aatggttcttcatcttatgaacacaatataaagatcaaacagaagcaacaacatgaattgacagagaggtgtgaaaataaaacaagcaggcaatcacctccatgttcagcagaactttgtcttgtcatgtgttcgttacacatcagtagcacacagcgaaagagaaaaacacaaaagtttgttgttttttatatttatctaataagagtgggaagactacatcaccagggaggagtagatccctgtcttgttgaaggagatcttgatcctaagctcccatcccttgaaaaccttgtcttctcttttggggtgcttgcgaatgggctagacccacgatagctagctcgaagagtctcatccacagagcgagaagacttggcaatggcattcctaacaaacttctgagcagctggagaaagtgttcgcacacttgggctggcactgcctcctcttgctggtgatggcaatggtggcttttgaaacatcttagnnctctctctcancttacgtgcagcttccctcgccaacg

SEQ ID NO: 4920 - DNA, 812 bp, Musa acuminata
  misc_feature (25)..(25): n = any nucleotide
  misc_feature (27)..(27): n = any nucleotide
  misc_feature (85)..(85): n = any nucleotide
  misc_feature (112)..(112): n = any nucleotide
  misc_feature (119)..(119): n = any nucleotide
  misc_feature (136)..(136): n = any nucleotide
  misc_feature (158)..(158): n = any nucleotide
  misc_feature (171)..(171): n = any nucleotide
ggttgaaatcgatgcagtacaactngntcaaggttgatcccctcctggatttatctcagcccctattgttatagaattgaatgcngagaaattttccataggcagcatatgnagttttncaaaacacacaattaancattccagattcataaagctgnctccctacacatntgaggggatatctactgagatacatttggatcttgatgaatcatctgacataggtaacatggttgccaaatatatgctccagcaacctctgcaaccaagagacaacttccagcgatctattttagttcatcaaaagtgtgacgttataaatctctcttcttgaaggaggcacaagtggctgacaagaagatgtgattttttcagcgcaaggggtttgcttccttccatagattaccaaccatttcaagtgatgctgactgtattagctacggaatggggactgattgtcaaaaggcagctcaataggtgtagcgttgccataaaattcttccaagttgtaataagctcgctgctgcggaagaaatatatgaactaccacatcaccaaagtctagtaaggtccatgagttgggcttggtatcaccagatgcaattttgttaaattgcttttcagctgtgtctcgtatctttgacccaattgcgtcaatttgcggtcgagaaaaggctgtgacgatgataaaaaatcgagtccagtaaaccagaggcttcacaaagagaacacggatatcagcagctttgacctcatttgcaactttgggctagtgtgaccgcaaaagacaagctctcggaatcatcatctgg

SEQ ID NO: 4921 - DNA, 705 bp, Musa acuminata
ttgtttaaatctataaatattagtaatacaacatcataccccattaagcaaaaaagcgtaccttgggatcaaacaagcggcagcacacatgaagaacatacaaagagtcttaagcggcgctgcaagatataaaccaagtatctacctgacactacaggaaaactagatcatgggcaaatctgcacaaggcatagtgtcttaggatacattatacatcaattaagacaacatttgtgttgtcaagcaagatttgttttcttgttatatagtctaatacttcccccattccggtaatgtcttactgcctcaagctctcaatgatataggaagcatagagatccattgagtattcaattgctttgatggcatcttccgctggcaggaagtcatttactgcaacctccttgttctcgttcttcttgtagtcttcaaagaagcggcggatttctgcaagacgatgaggtggcatatcattgatgtccttgtaatggcgaaactcagggtcatcagcacaaacggctattatcttgtcatccttctccccctgatcaatcattggcatcaacccaatagcacgagcacgcagaaaacaaccaggaccacctgctcctgcatcagtaccagtacatccatgggtcaccatcctcacagagggttcgagggatgaaaccatagttgtgtggataaaccactgaagagtagaga

SEQ ID NO: 4922 - DNA, 1179 bp, Musa acuminata
  misc_feature (5)..(6): n = any nucleotide
  misc_feature (9)..(9): n = any nucleotide
  misc_feature (12)..(12): n = any nucleotide
  misc_feature (14)..(14): n = any nucleotide
  misc_feature (580)..(580): n = any nucleotide
  misc_feature (1169)..(1169): n = any nucleotide
  misc_feature (1173)..(1173): n = any nucleotide
acccnnccngcnanagagaactttaatttgcatctgagaaaataatcagaaatgcaacgagcagatacagtagcgtcagaggtcagtttgacagatggaaaggcttcgagagatcgatcaccttcacagaaatgtaggaactctagcatccattgcttacagatgtagaacccatacagtcgagttgagaaaacaacaatagaaatacaagcagaatcacaacatgtatagaagaagatcactgagattctaaacagcattcagaagctctacacttgccctaaatacgataagaattccagttttgaaagctcactagaagaaatcaaattccaggtagttatcagaacctttctcagaggtgaggctggccttctggcttgctgatgctgcagtccctaggggccgagcgatttcgaagggcttggggatctcgggaggacttgcacatcttatcaaggcccagttgataccctcaaagaacgggtgttgctttatctctgtagccccacgtttataagcaagccggtgttgcggatctttgacaagcaatcccctaatgagatccctggcagcgaanttaacgactggaaactctgaaaatcgcaatggttgacccaccacattgaacagtgtagcacggttgcctgagcccttgaagggtgtcttcccgaacaaaagctcatacaggaagatgccaaacgtccaccaatccactgcactaccatgcccctctcccttgatgatctcaggggccaagtactcatgggtaccaacgaatgacatagaccttgcatctgtaggctctgcaacgagttcagggagtgcgctgacctggtttccagtatcacacttctgtttctgatgtttcttggactttgaggaaaaaagccgaggggagaagcatgttgttgggaccacacaagaaggttggacacaggatggttcgatacacgcaggctgaacacagtaaacagggttgtttcttctgaaggactcagagttggggttggaggatttgacgagggtggggttaacagcacaacggagggagaggtcaaagtcagagagcatgatgtggccatcttctcggacaaggacattctctggcttcaggtcacgatagataatgcccagcatgtgcaggtattctagagccaaggaggacntccngctatg

SEQ ID NO: 4923 - DNA, 504 bp, Musa acuminata
  misc_feature (13)..(13): n = any nucleotide
  misc_feature (489)..(489): n = any nucleotide
tgaaatgttaaanattcttcttcacttgagttgttgagaaaaagaaatattttgcaacagtgaagaaagtggataaaagaaacgaagccaactttacacttcaagaaatcttagtctttaacaagcagtcataaaagaaggctatatgatggcatgtcttctatcctcattacatcatccatcagaagctccctctccagctgcgcacgagtcgacttcagaacttcattaaattccatgtaagaagcatttctctctagccattgcttgtccatgaccatgaaagctacacagtaaagcaagtcgaatgcccattcatcctctgacagcatttggatgaaaacagctctgacaaatgtccttgcttttgtggactgcagatctaacatttgcataatcatgaaagtgatattcacaccagcaactgcaaatgggtattcccatgtggcccgcttcccacattgtttatttagcaacctctggaagggnttagagaatgttttt

SEQ ID NO: 4924 - DNA, 650 bp, Musa acuminata
  misc_feature (635)..(635): n = any nucleotide
  misc_feature (647)..(647): n = any nucleotide
gggttgttttttcacatgataggttacaggtgattagtgcatagaattttaagcagtaggcaacaggttacatgatttattacatggcagagtaaaatttcaatctggttgtttgaatatatctccactatcttcgcctaaggtaggaaaagataactagcatcgacaacaagagaagtgaacttacatgtatgattatgtagttcatggaatatttacgaagcaactccatatgggagaagggcagcagccactggccttccttcttcgcttaatatattgtaagttgaagcagcattcctcgagtcaattgcttccagtttcattccagtagaacgaatgaattgtcgcagttgagggcttactggctgaatgtgccttccacagccaagaatcagaatctctggaactggcctcagaatcttgaatactgataaactttcaggggttatctcagaaaatgtttttggtacccatgtcatgagcttattttccacaacaagcaagctgccttcatacttgacaccattgacagtaaatcctgtatcgccatacccatggaaacgcaattggtcttcaggcacggtgtcgatgagattaatctgatcatacagagagaacgtgcgctaaggganggtagggttcgnttt

SEQ ID NO: 4925 - DNA, 624 bp, Musa acuminata
  misc_feature (603)..(603): n = any nucleotide
ccaaattgtgacttaaaaatggaatagatctcaaacagaagacaatggaagatggctctggaaaaccctcctgaaaccagagtttacttgcctgttaaaaacattgataagctaaaggtataatgtcataagataactaaataaaccaatttatggctctgcgattgttacttcgacctccacaccaggttcaatggtgatcgaggttatctgcttcacaacctcagaagaactgacaagatcaatcaccctcttgtgcacgcgtagttcaaaccgatcccatgtattggttccttcaccacagggagatttcctggtggtaatgtggaggaccttggtgggcatcctcacgggacccttgacggtcagccgcttgtccttcgctcccctcaccagatctgcacaaaccttttcaaggttcttgacgttcttggaggagagggtgatccggatgcggtgaagctgctcctggggttcttccagccccagcttcgtcggtttcatcgctccgtaagccgccgccgccgccatggtttcgatgctgaacaaaccgaagcaaagacctaacactagaaatcgtcaaatcgagatggagggcctgancgaatagatgatacgtgaagg

SEQ ID NO: 4926 - DNA, 619 bp, Musa acuminata
  misc_feature (4)..(4): n = any nucleotide
  misc_feature (17)..(17): n = any nucleotide
  misc_feature (38)..(38): n = any nucleotide
tgtnaaaaatacatttnggacaataaataaaccaagcngtaattgctagagtttataaaagaaaatatcccaatcatatcactcactgtcccaggaacataatttaatttcttcactccagaaaacccgatcaagcacagggtgaaaattggtacaactcatggatgatcgccaatgtctgatcataacacatttatttgacagtccaaagaggctttatgctagtcttgctcaaagaacctccaactaactgtaaatgagtatagctagtagtttaattccattttgaactcaccgaagctatgcatgctttaacaactccactatctccgtgacttcttcggcctaatacgacgcagagccatatatgtcacagccgctgagagggagtaccatgtaaatgtataattcaagtggtcttgaggcatgactgaatgacggatcaaggtgttgacatcttttgggattggataaggattgcttgcgctgacatcttcattgatgtcttcaatataaagagtattatctgggacaccacatgctcgagcaatcattgcaacatcgacataaaaccactgaccagtgctgggatcattctccgggaaccaatatgctaggt

SEQ ID NO: 4927 - DNA, 554 bp, Musa acuminata
caacgctagtccattattttattcacaaaatatcatagtccattctcgaaacaaaacgcatgacaacctgcgatcgcacgacacgatagttaaagtcgcgattggagggacacacactcacgaccccttattcacgctaacacacagcaaacattcaaccggagatctcgatggacttgacattgggcttcttgaccccctccttgggcacggtgacggtgagcacgccgtcctccatggccgccttcacctgctccaccttggcgttctcggggagccggaacctccggaggaacctgccgctgctccgctcgacgcggtgccaggtgtcggtcttctcctcgtgctcgcggctccgctcgccgctgatctggaggacgcggccgtcctccacctccaccttgacctcctctttcctcagccccggaaggtcggccttgaacacgtgcgcctccggagtctccttccagtcgatgcgagtgtcagcggcgaaaagccgagggctgcgccggcgtaggaagaggttgggaaggggatccggggaacgagaggtt

SEQ ID NO: 4928 - DNA, 590 bp, Musa acuminata
  misc_feature (292)..(292): n = any nucleotide
  misc_feature (375)..(375): n = any nucleotide
  misc_feature (497)..(497): n = any nucleotide
  misc_feature (503)..(503): n = any nucleotide
  misc_feature (515)..(515): n = any nucleotide
  misc_feature (538)..(538): n = any nucleotide
  misc_feature (567)..(567): n = any nucleotide
agtattgtcataagctcctttcatgatcataatagttgggaagcatcttcagtagaatcttaagttcatattttctgagagtctttattacaaatctctcatcttgtgatagataaaatatgcttccacttttccctggagaagaaagctccttgaggccatcacctccacatattgacatcatatagtcagcggcatctatcttaaacatttcacgaaggttcctaaaaaccattgggcagtagtccttccaaaagaaaccaatagaactgtgtggaggtgtaaattgagntcctttgctagggaagtacattcgtattctagctcgagtcccaaaatcagaggaacgtacttcacgcataggcacaggtgtgnttttcccaactgtatacctaattccaagctgcaagtttagcatgagatagtagcttctgtggcctttataaattgtttcaccaggtccccttggttgtttcttcatcttgcagtgccatttnttcttntgtgatcttctnaagtcataatatctcatgccttnctgttatcagaactccttgcatgtactcnctatcataaaactaaaacactgt

SEQ ID NO: 4929 - DNA, 761 bp, Musa acuminata
  misc_feature (54)..(54): n = any nucleotide
  misc_feature (119)..(119): n = any nucleotide
  misc_feature (724)..(724): n = any nucleotide
tttgtacactcgggcactcttaaccccacttcacctaatcctggatgctctggntttcacccatcattatccgattgctgaccacgttaaaccctaagatcgatgcactcaccttctgncctttcttcccctttttcttcactcgtcctttggatggcccgtctagcccttcttctggcaccatcagcttcagtggcagctgtcgtgttagaattgcgatgactcgcactcccagtggatgggttatggggcttctgcaactggaaggcaatttcgaggacatctgatggcaaaaactccttgtagttgaggaacttgtcgatgaactcatgattcgggtccattgaaccgagattctccctcagtagcatttcagcctccgaagttgattgcttgatgcaaaattccagaaaacttgtatcattagtccccgtgagacggatccactcattcacacaccaatccctaaattccattgcttcttttgaaactgatggactggggctagaaaaggatgaaagagactgatccactggtctgcttcctgatggtttccgacctgatcctgctccagaagctcctttcgaagtggttcccttaattccccagctaccagagcttttgggatttggtttggtttgatcaagaggcccccaaaacagatcatcttcatctctagatttctgagctggaacttgtgaaatgagctgaatggatgatgcantgttggatggagatgatccaaataactgcctagaagt

SEQ ID NO: 4930 - DNA, 612 bp, Musa acuminata
  misc_feature (12)..(12): n = any nucleotide
  misc_feature (457)..(457): n = any nucleotide
  misc_feature (488)..(488): n = any nucleotide
  misc_feature (530)..(531): n = any nucleotide
  misc_feature (547)..(547): n = any nucleotide
  misc_feature (553)..(553): n = any nucleotide
acatcatatttnaaccagttccacagtagcgtggataagtagcataattagttatgtgataattggcataactaacaggcagtcatttgagaaagcaaactcattgagccaggcactgaatgagcgaaacaaggtcaaagtgacatgtgtatccgtttgatgtaaagcaattccatattcacaagaaaggagcaagagaacctcgaagaaaattccaaggttataggaccctaagctgtgcaaggaaggaagcacataggtcgagaaagaggagctgcggcccactcaccctctgcaagtcgaggagatacttctcttccctggtcttgtagagctggatttcaaacttgatcgtgctgaattctttcccagaaacattgtcactttcaacaatggcagattcatcgctaacactatggttagcatgcagggaatcattgaacatgctctctgcatnatcagaaatgccaaaaaaatatcggcatttnatgttataatgtccaatctttttccaacaaacatttagttcnngtagagctttaagganctccgncattatttcacgaggatgagctcgagactgaagtccaagagcccattttttctcaacag

SEQ ID NO: 4931 - DNA, 411 bp, Musa acuminata
ctactcaagatcatacatctcaattgccacaaactattttatcccaatcttttgatgaaaactcatcaccaacaaattattttttttctacacttgtacacgactgaataagctgttttgagcaaatcatcatctaaggtcaccattatcttgatcaggggaacgacatgaaggatttagggcatgcaatgtaaatcttctcaaactcgctgtcacatgaatagagcctctcaggttgcgtttcgattcactttgaggtacggtagtgcaccaatgacattgtcgtagtcactcttgtttactggatgcatcttggacagccggagcttcctcttggtgttcttcttcgccagcaagtgctgcttccccgcccgcctcctcacaatcttcccccgccccgttacccggaac

SEQ ID NO: 4932 - DNA, 417 bp, Musa acuminata
tatataggttaaagtacagtgtccacagtatagaaggtttcacaaaagaacaatagtatcaagaggcataaaggttttcaacaggagcataccaacatcctcacatacggatatcctcgcgcaggaggaacagagactttgccacgcaatgttagccttcagtcggcagtccagctttgctccactatctcacgaactctccgattgtattcacgcttgttctcgctgaacatacgagcagcctcagaattcgcaggagagtttgggttcgggtcgcagaggagcgactgaatagaagtcaatattgcagcaacatcatagattggactccattgattctgtaaaatatccaggcaaatgcttccatctgcataaatgtttggatgaaacattcgtgagacaaaccgcacagttggg

SEQ ID NO: 4933 - DNA, 625 bp, Musa acuminata
  misc_feature (607)..(607): n = any nucleotide
gactcggtcaacgtaaccccaatattattcaaatataattgaattgacgagttggaatcctattgttcctttgtcatagtaaaagatgccggatcggatcggagtccaacccggatccgaaaggaacaaccacaaacgacaagacaaagtatcgatgcgatctactcgctctccacggtctcgtccacgccactgccttcgtctgccttggccgccgctccccgggccatttccagtgcctgaatcaagccctcgaggcgcgaaccggcatcgtccttcacggacttggtcatcaggttctccgccacgtccgccggcgtcatcttcacctcctccatcagccccttgatggtgtcgaacagcgggtgcgagtcgatgtccaggtagtttttggccagcacaatgaacgcctcgaaatggcagtaggacagctcgatgtgcttgtccatcctccccctccgtatcagcgccgggtccagcttctccacgtggttggtggtgaagattatgagccgctcccccgccgcaggcgaccacaggccgtcgatgaagttgagcagcccggagagcgtaccttgctctcctccttgtcctcttctcccccggnacttcggttgtcgtcgct

SEQ ID NO: 4934 - DNA, 603 bp, Musa acuminata
acatgttataatagatcattaaagcaatacaaaagagtagaattctagcaattcaaaatttcaaacaacctttggctggatctgctcaaaatcaaacacctcaaacatcaaacgcctgacatctggtttaccatagacagtgtatgcaagaccatgtatcgcttgctgtactgcagttgtggccggatttctcagccttcggttatgctcgtacttgtcttgtgctagctcaccatagatgatgaaatggtgaagatgcttatccctcaagtatcggccacagaatttgttcatcagcgttcgccggtgcttctcttgtaaccatctaccaggggcatcaagatgcttcattagtaatctctcagccatcacaagatcctgaatcttctggccaacgtattccaaccgctcaaaacaaaatcgaggatgctcaaacttgtatttagaagaatgtagaaagcacaactgaagaccaaggccaagttcaatattcctggcctcagtgattctgcaattcgtcactcatgggcaaaggatagcccagtgtttccataactttgggtctgtatcaaagtcccagatattcctcgaaccgtgcatgct

SEQ ID NO: 4935 - DNA, 592 bp, Musa acuminata
  misc_feature (15)..(15): n = any nucleotide
  misc_feature (32)..(32): n = any nucleotide
  misc_feature (514)..(514): n = any nucleotide
  misc_feature (579)..(579): n = any nucleotide
ctgcataatatattncatttttttaatatctnatcccagaagaattgcctcttaacagtaatagtcacatgaaaccaaatttggaagttcattaacataatctcactggaataagtaaagctataactcagtctacttaactagtttcttcaacacatcctcagcacgtttttccagcttgggcagtgcccaatcgtgctgaatgatgtcaatgctatccttctccgcacccaagctctttgttggatcaaaaccaaatccgctcatttgcatcatccgctgcgtgtcgtccatagcattctcttcacccagaattaggctgaataaaccccttagtccaaacaaatttagaaagtaccaggaacgactgctgacatagctcacatcgacagtgcttaaatcgattccattctgcagcattcccctaaatctatgggtcaagggaaatggtatttttgctgccacaaaaccagagaagaaaaagttcacccatgcaaatgtaagtgtctgtggnatgatcattgaaaggttcttcttcatcatatccatagctaagtttgggtctgaaaacatctgagnctgtgcattttga

SEQ ID NO: 4936 - DNA, 522 bp, Musa acuminata
  misc_feature (13)..(14): n = any nucleotide
  misc_feature (18)..(20): n = any nucleotide
  misc_feature (441)..(441): n = any nucleotide
gatattgtattgnntaannngtgttggaacacatacttattacaacaaaatcaaagtaaacagtgccatatgcatcagatacatacagctctactgtctgcaaacatatatcacaaaaatagaccagtatatgttgttgactgctcagtaatattcgagatcagttatcaaagaaaagaatgaaaaccaaaatttgtaatgaccatgaacaagtagtcttcatatttggagggtgcatatggtaccacccatgtcctaaataatgtgctcgatcactggaacttcgaggaacgccagtcatttgaccataaaggagcttttacaactgcacccccccactgcacttggatttgttaccacctggaatgctgaacggatcaattcctcgacataatcaacagtggaacctttgacaaagtcataggagatgttgtccaccancaacttcacaccatccttctcaaaaaccctatcatctgcgtttttcttgtcatcatgcaaaagacatactggaacccagag

SEQ ID NO: 4937 - DNA, 779 bp, Musa acuminata
  misc_feature (5)..(5): n = any nucleotide
  misc_feature (9)..(9): n = any nucleotide
  misc_feature (11)..(11): n = any nucleotide
  misc_feature (54)..(54): n = any nucleotide
  misc_feature (58)..(58): n = any nucleotide
  misc_feature (295)..(295): n = any nucleotide
  misc_feature (301)..(301): n = any nucleotide
  misc_feature (398)..(398): n = any nucleotide
  misc_feature (454)..(454): n = any nucleotide
  misc_feature (477)..(477): n = any nucleotide
  misc_feature (484)..(484): n = any nucleotide
  misc_feature (502)..(502): n = any nucleotide
  misc_feature (545)..(545): n = any nucleotide
  misc_feature (606)..(606): n = any nucleotide
  misc_feature (615)..(615): n = any nucleotide
  misc_feature (627)..(627): n = any nucleotide
  misc_feature (642)..(642): n = any nucleotide
  misc_feature (644)..(644): n = any nucleotide
  misc_feature (670)..(670): n = any nucleotide
  misc_feature (711)..(711): n = any nucleotide
  misc_feature (718)..(718): n = any nucleotide
  misc_feature (738)..(738): n = any nucleotide
  misc_feature (743)..(743): n = any nucleotide
  misc_feature (772)..(772): n = any nucleotide
cggcntcantnactctgaatcaattctcaatacattcctcgtctttaatttgcngganactcctatttctactgacgcatcttggcgatctccagcagcttctccgtctccggcatcacctccttcacggcctcgtgggcgcagaacctctccgcccaaaccgcgagcagaggtgtcttctcctcgtcgaacaacttgaggccggtcatctgctcgatcacattcgcccatcccaggtaggcaccgagagcgatgtcgacgtaaccgatggtgtccccgccgaagaaggctttgnccttgntcagcttctcaaacgcctcctcgagcagcttcagcccggcccacgcttgctctgcggattcggccttggcctcctctgtttcagcctttccgatgcngaatattgacgggaaccacttgtcgtcgatgtagacggaccagaagcggtggaggncgcgctcgtaggggtcggcaggnaagatgncctggccggaattagccnagaccccgtcgacgtactccacgatgatcatcgactcgcagangggcttgtcgtggtggaggaggacggggatcttcttgtacacagggttggatctgagaagnagctcgctnttctccccgaanttctcctgcaggaantngtactccacccccttcaggttgaggncgaccctcgggcgcagcacgaacgggctcggccacgccccnatcagcntcacttctcctgccgccgcngccantgccttgttcttcttctcccttcttcggntctcttt

SEQ ID NO: 4938 - DNA, 648 bp, Musa acuminata
  misc_feature (9)..(9): n = any nucleotide
  misc_feature (47)..(47): n = any nucleotide
taggttctngatttgatgatggttcaaacaatgctattctctcgganactcttccgaaaagattccatgttactacaggagaaagaaacgtgttacatatttacatgcgtgaatactttgctctctctcgctcctccatccctatccgatctctttattccaaattcttctcgtggaggtatccatcaatcctgctgtcagtggaggccggcctgaccgtcatttggcttggcatgccgccgagcaagaagacgtcatccatctccaaaccagtggcatagttgtggaggctctgacgaagaaacgcgtcatgctgcaggctgctgccgttgctcctgtcgagcctaaacggcgtctgggtgtactgatactgctgaggatgacgacgatgatggtgatgttgatgaggttcgtactggtgctcgaggtatgtaggctgcagtaggtgccccggcggcgccacggtcgtctgcgggtcactgaagtcgaggccgaaaccgggacggtagctggaagagtacggcccagacgggaacccggtgaactgctgcaccatggctcggaaattggaggtgtcggtataagcaggtgaccggggctctccgggaggtctcgtccgccgccgggccggctcacactcggctctcg

SEQ ID NO: 4939 - DNA, 401 bp, Musa acuminata
ctctctctcacacacacaaacatacattatttcatacattgtctacaaggagacttatttatgttcgaacaaatttactcagacgagcattttgatgcaagagctgattcgatttaccaaaaaacggccccatggaagtgactgcaactgcaaacaagtccacccatcagttcgtggagaaggctcggagagtttcatccagtgctctctggtcatagtcaccggtgaagacacagctacccaatggacccttcaaaaggatcaacctcagcaatccatcagccaccttcttatccactgccatgacagatttaaatttctccacagtcatcatctcggggggttgagttggaagcttggccttctgcaggatgctaaaaacacgcttcacaatagtatca

SEQ ID NO: 4940 - DNA, 600 bp, Musa acuminata
  misc_feature (7)..(7): n = any nucleotide
  misc_feature (12)..(12): n = any nucleotide
  misc_feature (571)..(571): n = any nucleotide
atgtacnattcntaccaatgttaatacatggagtttccgaatacgagcagaggaccctcccctatgtagataggaggacacgggagtgtggacaaacagcttcctcatcaaatttttgtggctctcaagaacacgtggccgaataccaaggaggttggcacgtacaacatcgaaggcctagcttctaattcctgagcataattcggcatcaaataggtttttgctattgtacaaatcagaacagctggaaaaataagctcgtggaaccatcgccgaatgacctaaggtctgctggtttcaccaatgctctacacaacgggcatgtcctttctctctcaaaccattcagagacgcagtcctcgcagaagatgtgtttacagctgagtaggataggagcatgcatcttctcctggcaaatagcacacagatcgccagcagcaattacctgttccattgttgcataggagccataaagtacttctttccgtgatagtgccttcaatgcagcaacaaaggattgaacttctccacaactgaagtcagcttaaaggtaaggtatagtcctgtagtnggagagaaaagaggctccatattctttgt

SEQ ID NO: 4941 - DNA, 534 bp, Musa acuminata
  misc_feature (459)..(459): n = any nucleotide
aatgatttagttcagacaccaaagaaactatctcttacatgctttcatgtcatcgacatagctcattaaaacgaaaaggtcgcagcaagaaaattgatacacatcgatgtacatataataatactagaccctctgcgtgacaccaagggcactatggtaatttggtccgcctccgccatctaccgcttctagtcgtcggtgtcatcatccccgccgaagatggagaagcggtagtagaggaggaagaggatgagcagcaggaggagcgcgacgccgacgggggagcccccgacgcggtggatggagtcgggggagccggcggcgaatatgtccgagagaatggcgccacggtccgacgagaggaagcggatcaccagaacgaggaggacggggaggagcagcaaccccgcggggctcagcatgtcggagatggcccctgttatggttccccaaccccgncgacgaggaacggcgccgcaaccaacaacccaaccaacaacgccagcagaacaccatgaggtggactccccggac

SEQ ID NO: 4942 - DNA, 613 bp, Musa acuminata
  misc_feature (6)..(6): n = any nucleotide
  misc_feature (602)..(602): n = any nucleotide
catctnctatttttatccatttgattaattcaaatttagcttcttgcactcacattgtaaatattttccgccaagtccctcaccaaaatttgacgcgcacaagagttgtcagaataagagcaggcacacaacggcacagcacacaaggaagagccaaatctgatggagtgaccgtttcagctccatctcctgccttctgagcctgccgctgccgacgtcgccgcccatgtggtaaggactcgagtagtaaatgcctggccgctcttgattccggaacacccacgggagcaccgccatcaccaacccccccagcagcccgccggccgtagagtggatcaccctcgtcgctcccgacgtgtactcccacccgtgattagggtactggtggatgtgtggtggtacttggaaaagtgggcagaaatgttgctgctggcatgactggtggtttggcttatattcttgatgaggatgacacttcttattcccaaggtcaacaaggagatagtgaagattcagaggggtaaatgccccagcaggacaaatgcagctgaagagcttgatagaagctcacgtgaaaaaaactggtagtagtaaaggtgctngcaattttgag

SEQ ID NO: 4943 - DNA, 1067 bp, Musa acuminata
  misc_feature (50)..(50): n = any nucleotide
  misc_feature (60)..(61): n = any nucleotide
  misc_feature (72)..(72): n = any nucleotide
  misc_feature (99)..(99): n = any nucleotide
  misc_feature (115)..(115): n = any nucleotide
  misc_feature (612)..(612): n = any nucleotide
  misc_feature (1009)..(1009): n = any nucleotide
  misc_feature (1044)..(1044): n = any nucleotide
gatccagatgtcaatgaagatgatcttaaggaagctttttctcgctatgntgaggttccnnccgttaaaatncctgttggaaagcaatgtggttttgtnctttttgttcacgganataatgctgaagaagcaatgcaacagttaaatggtacaattattggcaagaaaacagttcgcctgtcttggggtcgcaaccctgcaaaaaagcagtcaagagctgaacgtggcaagcggtggaatggtgcttactatggagggcaggtgtatgatggatacagtttatctcctcactacccaggtatgtacgtattaccaccgtatggcgcttacgctttctacgatagccaacaacaagtgaactgagatacaaattactgccgactcaaaagggataaactcccagcattatagtagtggtcaatgtaggtcgtgaactagtcgaaaaccttgagttcaaactgaagttctttaagtttacacacatctgggttttcgactagttcacgacctacattgaccactactataatgctgggagtttatcccttttgagtcggcagtaatttgtatctcagttcacttgttgttggcttccgtagaaagcgtaaggcncatacggtggtaatacgtacatacctgggtagtgaggagataaactgtatccatcatacacctgccctccatagtaagcaccattccaccgcttgccacgttcagctcttgactgcttttttgcagggttgcgaccccaagacaggcgaactgtttgcttgccaataattgtaccatttaactgttgcattgcttcttcagcattatttctgtgaacaaaaagcacaaaaccacattgctttccaacaggaattttaacggaggcaacctcaccatagcgagaaaaagcttccttaagatcatcttcattgacatctggatcaagccctccaacaaatactgttgtattagctgaatccatgtctgtttgggagctgctgcagatgcaccatttggnccaaaaccaccagaaaaccttttaggtgtagcaanggccaacccgcataggcctcgtg

SEQ ID NO: 4944 - DNA, 780 bp, Musa acuminata
ttctaagccaatatataatttgctactgcaatttagttcaatatgtttcgttaaaataagtagctccatctcttgtattaccacaatattcaaaggaaccaaacaaccaaaagaacaagcgaccgaccttagtttgtagtggtcctcactgaacataggaacaaataacagcgaacacatgacaccgagacgagccccaccgagtgttctccacatctccaaactgagaatgtgtttctaaggccactcgtacgctccgagaaacaacgtaatctagttttatggatttgacatgagcacaaacttcctccttcggatgcatttcctaatgcgcagaatgtttccatcctccgaatgcttcctcgtcaaagcctcgagtttccactggcgtgaaagtgagaccgacttttatttctccacagtatcgctgatccttgaccacactgtatatggttggcgtgaggcttccttccacgaacactgcttccaatgggatttttgcttctcctacgaaatcatcttttgaaaaagtatcactgtccatgattttaacaatgagctccgagacattgtcagacacattaaagacaaaggtctcattccattcaggattactacctgcacctgatgcagtactgcttttctgttcctgactgcggtacgtaaggacggcataaggatccattttgccgaagaaatcgacgtcctcgaggcccttggcgctcacgagcagcacctccagcgttccacgaaccattctcgagctctcgaacgcgacga

SEQ ID NO: 4945 - DNA, 794 bp, Musa acuminata
aatgaatgatttcagtgaaaaaaagaagtttccatgacagagtagaaaacattccaggagcataactgctcttgattacaaatggaatgcaacaacaaacttctagagaagggatttaaaatgtcatacatgaagcaacttgatgccttgatgctaactggatgcctcttctttcttttcctttctttctttcacaacctttttccagttctctgtgctgtcgattatttcgccagttttgatgaggtagcggactctggttccgtcctcgaggattttgtgacccactctgctcgccacttctttttctttagagtaaagcatcacatttgagctgtggataggtgcttcaatcttgacaatctgcccaggttcaccttgttctctgctcttcatgtgctttgttttcaggttcaagccttttacaatcacagtgctgttatgcctgaaaatgcgagtaatttccccaattttaccgttctcatggcctgtgataagtttgactgtgtcccctaccttaacatgcattttatgcagtatgggaagactatttggtttacattccttgcgctcccagcgtttaagcctcattactatagtgcatggctggtccaccgatttaacgggcgtcgataggagtgggggagagaggcgctggcccaagaaggaattggaggagatggaaagggatgccatcgagctctgtagcgccaccatcgtcgccatcttcgagcgctcacttctgcgcttgggagttcggataaagcgcagaaggggtgagtgccacgcgtccg

SEQ ID NO: 4946 - DNA, 621 bp, Musa acuminata
tgtatccaagatatattacatgtggtggaatgatttattccagatgttcagcttgcttgtctgctatttagtacagaaaaaatatatctgatgccatacatactgttaagtatatctagaaataaacagtagaatgcctcaaaacagctatttgtagacatgcttagacttcaacaatgcatctcgctttccaaagtggatttcatgtttcaacctagtcttggggcttttccagctcctccatgaattctgttgtcatgacaagataatcctccaagtgcagtcgcttccattcctcaaaatcccactccccatacaagtttggatcatccttgttaccccagatatatgcatcaactattagtttctcagaattatcaaccaaagaaacctcaacagcccttctctcatattcgaggtcttcaaaggaatctaggacatctaactcttgatctgtgatgccccgtaaaacctctcctgcaacattcttacaatctatgggcaggattgctggataaacacgggccctttatactaaatctgtggtaattatggaggatggcaggggaggaggggggaactcgcttgagaagcacgcgcaccaacctcatctgccaatag

SEQ ID NO: 4947 - DNA, 537 bp, Musa acuminata
attactgcaatcttggcttcccaacatttggatgttaggatactaatttaagcttcaaattgaagctttgaagttatcagaaactactgaatattataaatcaatgacacacactgtctttgagaacacagtgcgatctcaaacaaacatgacccaatatccatggtttcgaacaagggttttattatcactttgagctgatcctcctgaaatgcttcactctgtttccggcctagtaaagaaattgttgattgctggcatgatctctgggtttttgttccggacgaatttacggagactatgctctgcatatttctctccctccgcatggttatccagcactcccgcagcccttccttccttgctaactctcacttccgggttgatgcagatgttgcggacaagctggaagccgcagatgcccaccgccaccccgaccgccgcaaacagcgggtagacctcgggcttaaccaacgtttaagggtggaagacgccatggaaacaggcgacggggctgaggaggagatgcgaagagcg

SEQ ID NO: 4948 - DNA, 669 bp, Musa acuminata
  misc_feature (629)..(629): n = any nucleotide
agcgcccagaagtcgttaccatcaggaagaacttgagtcttaaccacgatcttcttctaataaatatcaatagaatgtgactaagcaagcagaaaatataattaggatgcagaaacttaagggtacaaatcatagtaggctgagttgatgagggaggcaatcttgatggttatcagtcccctcttccatccggttgctagcatcacatttgagagaccaataaacttcatagaacttcccatttgagaaaaggatataacagactgttgatttttgcaagctgaccctcagcctcaaattgagatcgcaggcaccatcaaccaataacgtgattcagataaccctcctctgtcctccaaatgcccaaatctttagcttcttgtcccagctacctgtgcataaagcactaccatcagaagacaaatctaagcagcttatgcatccctcatgagaattctgaagttctcccaggttcagaaccacctcagccaacagtgtatcccacacataacaagcaccactggagtatccagcaaagagcagtcttcctgatatagagaaggcatagtgtgacagttgggatatcattgtcaacaccgtcatgctgttgactgtatacttgagtgtgnccagttctcatatcatatagcctgcatgtgctgtcattgg

SEQ ID NO: 4949 - DNA, 565 bp, Musa acuminata
  misc_feature (542)..(542): n = any nucleotide
atttcctaacaatgacagacaagaaacataaactgtgctggtaattaaaggcaactgttgtgaaaattttagtacgaaaatacaaagccaaacaaagatgtatataactgtctcagatcaccagaatgtttcaggtgtaagatattgcaagaagagctcattaacttatatatgcttcttcaagattcaaccatgggttctggtccagatgaatcggtgaggctcgggcgtatacagcttgtatgatgaacagaattaaacagaatgtccttgataacctgagacatgagaccatgcacctgctcaactgtgattttggagctatcacgtgttatcttggccagctgagattcctctggctccttttttctttgtgaaggcaaaagaaaagatcccaaacgtgtgtgagccagttgattttctgcctgctccagcttttcagccaaatctgaaatttgcccagcaacataatctcgattacctaggagaggtgaagaagacaatgtatttacccagtacttattccacagcaaatccaagangtgggatccagagcagacttgaa

SEQ ID NO: 4950 - DNA, 794 bp, Musa acuminata
  misc_feature (10)..(10): n = any nucleotide
  misc_feature (604)..(604): n = any nucleotide
  misc_feature (619)..(619): n = any nucleotide
  misc_feature (675)..(675): n = any nucleotide
  misc_feature (685)..(685): n = any nucleotide
  misc_feature (687)..(687): n = any nucleotide
  misc_feature (772)..(772): n = any nucleotide
  misc_feature (779)..(779): n = any nucleotide
ttcatcgaanatatgttctcatctaaaagaaagaaactattctagaaacaattaaggtagataaatctcattacagattgagcagctatatgtatcgtttatgaagtcgcaagaagaaaacaaataacacttgagttcggagatgacattctcagatttgacttcccacagcacagaaggtttagaaggtcaacctgcagatatgtaaagagccatgggaaaggctgcaaggttccacatgaagggtagtactctcagttcttgcttccgaatccgcgagggctgggtcttgctgatgccgagtctgcaaactgtttcctcggctccgatcgtctcctcctccgtgcagtgccaggaggtgccttttgctctgctttcagtgactcctctaggttgctcaatgctgggatggatcctccttgcatgacccccaataagttcttcattcgaacacgcatttggaatagttgagcaacaagttgactcacctgctgctctgtctttccagactcagtagcaattctcttccttctagctggtgactcagctagaagctctggcttttcccgttcctctggggtcatcacattaatcattgactccntgatcctcagatttntctctgcttcacgaatttgagatggagtaaccttccccatgcctggaatcattccnatgacacggntnacagaacccatttgtgcaacagcacgtgtttgttttaaaaagtcattgaagtcaaattttgcgctcatgatcttcttttgtagtncctcagnatcttcttatcgcat

SEQ ID NO: 4951 - DNA, 774 bp, Musa acuminata
  misc_feature (12)..(12): n = any nucleotide
  misc_feature (132)..(132): n = any nucleotide
tatcggatgtantaagactatccccaacgagggggagagtgtaatgtctgatgacggaactaaatccatacacatgagagaattactcggatccaatgacaagtgcattatatgtataatacatattgctgntttctcctgaaatatgtagaaaggtctttgcaacaaaacattaatttttgcctcagaaaatgttcagcaccacaaacttcctgccagagtgaatctgcaggcactaccgtggatcgatcaccgtgatagtaacctcgttcacagaatgcgttcgcgttgaatcagacttggtagccgatgacttgagtccgtccgtcctcaaccttgcgaacgacgggggttcatttggcagcgggagaggcatctgctcactcttcaacatcagcagcaccgacgacatggtgggtctgtcgtctgggctctcctgcacgcacagcaacccaacctggaaacaccggcgtgcttcgttcgtagggtaacagtctccgagcgacggatccacgaactcggaggctctgtccttctcccacagctcccatgcatgtctgagaagggtttggccgcgttgcagaacgtgcgatgccccgtttctttgcccattcaggatctccagcaggagaacaccatagctgaagacgtcagacttgaaacgagaaggtgccttccattgcgtactccggagccatgtaaccataggttcccacgactctgccagtgttgacttcgtagtcttctcctcgaagatcttcgccatgccgaagt

SEQ ID NO: 4952 - DNA, 714 bp, Musa acuminata
gcagatcataaagtagtatcatttctgttcaacaaaacatattgaagtacaccattcattatgcagcccaatagtttctcctgatcattcgagttatttcaaaacaaatgaggcccagcaaatgatcacatcaaaaatgttctgtttgttgtacatgctgtactgcagcctgaagacacaagtgatacaacttgtttggttacatccgaccatgatgttcatcgaaaactttaacctacaaaacttttaagttgaccacgaacggattcacgagcatttggtagccgacttaattttcatgaagttactttctaatgtagctgagattcccaaacatcaaatgtaatcttccctgaatcactggtggtgcatatatcatatctcaaggtcatccaatgaaatttcttgaggtgagagaatcttcagtttagtggataaactgggaaggatcatcaatactggatgagccgaggatgatttccctcttcaactttgtggtaagcttgtggacaacacgtagctcagatcgagtggctccaccaatgataaatacaaaaatgcgctggcccatctttttaaaatcacttgatgaatgcctcaacacagaatcacttgaatatccatcatcagaacttcgtgggctagcccatgtcgccgcctagatctcatggattgagctggtgcatggtgagtgtggaacagatgatcttgtga

SEQ ID NO: 4953 - DNA, 613 bp, Musa acuminata
  misc_feature (10)..(10): n = any nucleotide
  misc_feature (516)..(516): n = any nucleotide
cctataatanttccttgtataaaatctgtaaagtacatatgacacaagttagaggtggaataatgatccatccactggtggcattcaagaaatggcatgtagaataggtaaaaggatttacatatttgaataacaagggagaggcaatgattcgatggagggtctctcaccacatgcctatagatcacgcagcagcagaaggaaccacatgcttctactgttctttggaagagattgcctcaggaagtttgtttgtgggaggtctatcagctccccttcttgagtactctctccaccttctagccgcagcagcagctctcttagccctctccttcacttcttcctctgtagtttcataattcttgggtgccccccaaatgttgctccaggacccactcttatcagaatccttctgcttcatcattcgtatcttagccctttccaagacttttgcttggcgcttttcccatcttgaacatgccattctgaacacgtcaagggatgagctccccattncagaaagcattagcccaacattcactctctccacccttcgcatttcatcttcaaggaggatagtgtgagcagatgtccggtgatgcaatcaactggg

SEQ ID NO: 4954 - DNA, 597 bp, Musa acuminata
  misc_feature (9)..(10): n = any nucleotide
  misc_feature (14)..(14): n = any nucleotide
  misc_feature (17)..(17): n = any nucleotide
  misc_feature (512)..(512): n = any nucleotide
  misc_feature (548)..(548): n = any nucleotide
  misc_feature (566)..(566): n = any nucleotide
tcatctcanncttncanatttcacattatttgaagaaataattccacaaacaaacacaattcggtatctgttcactgtagactatgtacagtatgattgcactaacgttgtatgtgtcagctcatgctccacgttcctggttctgcctctgcgatttccggaagtgggagttcctgtacaaactcttgccatccttgtgcagggagacctcggaatggatcactgagttggggaatcgttgcttgtgtctctcgtcgtgattgttgtgattcttctcttggatctccaccttctccttctccttctccttctcctcctcttcctcctttggagcgacgtacacgaaggcaccgacggggacgtcgttcaggttgagaagcggctccaacatctccacgacggttctcatctccggcctcgacttggggttgtggctcaagcatttgtaggcaatcgccgcggccttctgggctcctttggtggagtagagtccgtcgaggccggggtccatnactcgccggagcttgtcggcgttggtgaggtaaggncgagcccagtcgaacgangttcttctgcctgttgggtcggttctgtcga

SEQ ID NO: 4955 - DNA, 599 bp, Musa acuminata
  misc_feature (21)..(21): n = any nucleotide
  misc_feature (49)..(49): n = any nucleotide
  misc_feature (94)..(94): n = any nucleotide
  misc_feature (552)..(552): n = any nucleotide
  misc_feature (560)..(560): n = any nucleotide
  misc_feature (587)..(587): n = any nucleotide
ccaataaaggtcatccttganaagagtctgttgaccttatttggccttnataataggtctttaaatatattactccacttttaataaactagcnaagcatcatcgaataaagtaagttccgggcacctcaggttgctgctgctgcttatcaatcaaacgacaccttgtgcacaatccttgctcctcttgattttgccatgtagagtcctatataatgaagcacatcctgaggatgggccaaagctcccttgatgtttcttgcaacatgaattggaaggtcatgtgttgcacaacctcgtgcataaaccacaacatcttccagtggtggaaccaggcctatatttctagcagagagcgtggaacatacaaagtccaacacgcagatatctgtgcatactcctaccaccaaaacgactctgatttcatttcttttcacccaatcagagaacacattagagccatccttctccattgaaccaacgaagccatcaatacaatctttccttctcacagtaaaatttggatccttctccagccatttcagagcagggnctaatctntcttcggccgaaccgatgatacaatgnggtggatacgga

SEQ ID NO: 4956 - DNA, 616 bp, Musa acuminata
  misc_feature (510)..(510): n = any nucleotide
  misc_feature (521)..(521): n = any nucleotide
  misc_feature (524)..(524): n = any nucleotide
tttttattctcattatattcttatagcatgatctctgcattcttatgcagacattatattcttatagcatgactgacagcatcataatctctgatacttatccgtgtgcattctaaacattcttcaagaatgggcagctcgaagcaggcagtcctgcgtcctccatcttcgcacccttgaggaggccaccgagtagctcaccacgatcgtagaagaactccaccttctcgatcttcatgtcctcatcgacttgaaatattgccatcccatagagctccaccatctcccccgtcggtgcatggccttggaaaggcccctccatgaagccccagtgccggaacttgtacacgatccccggcgggccgctgtagacatggacgacctccaaagcgaacccacgaggaaacgccgtggtgaaggcggcgtgagatgactccatcgtctccctcgacgggtcgtacacgcgcaggccttgcggcagcgacgtctgcagcagcgagttgtagccgnctcccaacttncgnttctgttctagcgttatcggtcttcggcccattgaggctgaaggtgtaagttatccggattcacggttttgtagtcttggaatcgtctcttg

SEQ ID NO: 4957 - DNA, 465 bp, Musa acuminata
  misc_feature (8)..(8): n = any nucleotide
  misc_feature (166)..(166): n = any nucleotide
  misc_feature (256)..(256): n = any nucleotide
  misc_feature (268)..(268): n = any nucleotide
  misc_feature (286)..(286): n = any nucleotide
  misc_feature (331)..(331): n = any nucleotide
  misc_feature (341)..(341): n = any nucleotide
  misc_feature (365)..(365): n = any nucleotide
  misc_feature (432)..(432): n = any nucleotide
  misc_feature (442)..(442): n = any nucleotide
gaagaggntcaatttataggtcgatacaagttgattgtctacaaagaatggcgtacataattatatttacaaagtgaaaactgtggctgcacaatatctgtgagggatgcttagcctgcatcaagaatgctaaatagggcttgatgcagatgaaaaaaaaaaagangaaaaaacttgttttcttcctcttaccctcacatcgtaactccaaaaaatcgagttctttgattttggtaatgctaaccactcaaaatgncatgattgccanaaaagggttgtgtcattnctatacagtgaacggtcttgaatccctaaatttgcaacatgccantcaacaagtnttgcttggatacatttacacaganccaggccaactggaaacaaccaccatgccactctcatccgggcccaaattccatggttgtaggtttngatgtttttnacttgaagacttgtaatgtacaa

SEQ ID NO: 4958 - DNA, 724 bp, Musa acuminata
  misc_feature (7)..(7): n = any nucleotide
  misc_feature (14)..(14): n = any nucleotide
  misc_feature (33)..(33): n = any nucleotide
  misc_feature (43)..(43): n = any nucleotide
  misc_feature (639)..(639): n = any nucleotide
gccaaanatatatnatcaaagttaatataagtnaatacaacanccctagctccaaatttagggactaaaggactgagagctcaataatgtggacattttaatgtacataatgaaacaagaattcaagttctctactgacttgtgtcatggtacatataagtttctattgaaggtttttcaatgaggctttggagaaattagaaacaggattggaatttcctttaatttaaacaactgaatggttcggaattgttctcttaatgaaattaatcatgccaatgaatgatgcattagaatctgaagtcgggatcaacatccattgcccaggcgaattttgcaagcagcgacttgttgaatatcttctcgatgggtacttcatggcgcttgcaccatgcaactgatattctaggatcaaggtagttaatctttgatgtccctagtgcaactgtcttgagatcctcttttattcttttatccaactccattttctctatctttgcatcaacctggcacaagcttcttttctatcacatcaggggacaagttcttcttcgtcttcccttctttatctttaagtggaggtttccctttcctagccctattcaaatccatattcaactcgtctctctgggcctttanggcatttatcttctcattcaacttgacatctgactttcatgggacttgagacactgcgctggtgattacatataattgcaacctc

SEQ ID NO: 4959 - DNA, 575 bp, Musa acuminata
  misc_feature (4)..(4): n = any nucleotide
  misc_feature (6)..(6): n = any nucleotide
  misc_feature (8)..(8): n = any nucleotide
  misc_feature (10)..(10): n = any nucleotide
  misc_feature (470)..(470): n = any nucleotide
aaantntnanataacatcattaataactagtttgccaataacatatttctattcgaaacaagaaaatgaaaccattactacaaattaaggttctaattgatttcccataaacaagtcacttggtacttgatactagtcgtaggatctagtctaaaagaaaaactactataatgtcgcataagataattcttgcatcatggccgaggtggatttccagctccggcaggacgaggtccttgcccaggcctcggcagatcatcccggcgtctgaagcgctgtggtggctcacggtttctcctgtcagtgcgagacctcaccctcacaaccttggagtggattgcacaagagacacagtactgcatcttgatatatagctttggcagagtgtacccatcataggcacaggcctcctgcacatccctcacggcagcctgctccactatattcctcacaagaaacctcttgatggncttgtccttggggcagcacttgccgcagttggagcagcggatgaagttaacgtggccgcggccatgcttgttgcgtccaccattcctgcgcttgaaagtcatcgt

SEQ ID NO: 4960 - DNA, 595 bp, Musa acuminata
  misc_feature (479)..(479): n = any nucleotide
  misc_feature (499)..(499): n = any nucleotide
  misc_feature (592)..(592): n = any nucleotide
ctggttgtattgaattcttcattctgatttattcatagcagatggcttttttttttcatcagatactaactaaatattgtccggttcacaaaagttacgattggattcaatgcaagtggccataattttgcttgcatgagcttctctttgtcttctcagctttagatagaatctccagcttcctcaacccatgatgccatcgccaaagtgtggcgtccaccgcaggcaacaagcttggcgcaccactgcccgtcggtgctgccgctgtctcttggtggtagcagtttgatgggcacttccattgggtggccggttgtgaccttcctcccatagcctaggcgtccatggtcgccccttccaaaagagaacattcgcccatcacgtgtacatgccactgaatgagtgcctccacaagatacctgaacaatatcttccccgactaggagttggaccttctgaggaaccattttactactctngtcatctccaaatccaagcntcccatgctcccctcttccccaagcatatacctctccaacattggttagtgcagttgaatgccaacttccagcagcaatgtcaaccaaagtangac

SEQ ID NO: 4961 - DNA, 555 bp, Musa acuminata
aagcttgcagtatttccagaagcaacatctacattagttaagaggcaccacctccctctctactaccacttgtaccactagttcatgtccacctatggtgagaatgatgtattgaacaccagaacagaccattcaactcacaagttggcgtacagcagtcctggaatctgtcggccgaggccacaatgggcagctggttcaccaccatcgagccccatgccgccgtgaagccgtcgggggtctgcaagctgttgcagctgcttccacccatgaagtaggcgagctcactcagggactccagcctggagctcaactccgtcagctgcgtcctcagcagggagttctcagcttccacacccgcgtagtgctgggtggtgatgttgagggcgatgaggatctggctgttctctttctgcagctggctaacctgcgccttcagatcgtccatatgcttctgcttcctcatccgggatcgccgcgccgactcccggttcgacagcatcctcttcagcttcctctggttgatcaaagcctgcacgtctgctcggatccaga

SEQ ID NO: 4962 - DNA, 978 bp, Musa acuminata
  misc_feature (13)..(13): n = any nucleotide
  misc_feature (959)..(959): n = any nucleotide
agaagtcacgtcngactcctttgttcattcttccaagaattcttagcagcttcagcagatgaagtgccagactcaccattaccatccttaggcttagagaagaaaggatcccactcatgtggcccaactgttcgctgaccatcctctaacaaagcatacttccagctgttctcttcaatgacatcatccttttcttcgtggccttcaatcatgtcccttcttagtcttgtaactttgtcgatgattgcctgtacagccacatcaaaggcatcattaagagtctccaacttagacctagggtctgcatatatcaggcttggtataaggcttatgactgactctctcattgtttccataacatgtggagggatttgctttaacctttcctcgatactgacactcctctttcgaatatcatcctcaggtataaacactgagtatgttgagtagtttcttgggagatgccatgtatattgtatataagcagagccaggatgaaagaaaacaggtatgcaaccagccaaaatggagtcaaaagctgatctccttgtatatgaatctccctgtggttgtaagcaaaataaagaactctgaaacatctgcattatgctgcttggggagtgacacttgctctctccaaaatcacactccagcaacttacaaactttggaccttttgcactgatctatgatcttccctctgattgattctggattatcagggcgtggtgcacctgcaaatgagaagagaaacttccgctccaacttcctcatccggtcctgccaaatgaagacatcagcatcctttgctgggtgaaagtatgtaggataaggtatcccaaaatcattagcattccatgggctcgcttccacaaccagcatcgacatgtttcttgcagctggcaagaatagaagcttgtttccccaatctgtttcagaatcagtcaatctcctgaaatnccaagtaattctccctgcc

SEQ ID NO: 4963 - DNA, 566 bp, Musa acuminata
  misc_feature (499)..(499): n = any nucleotide
  misc_feature (507)..(508): n = any nucleotide
  misc_feature (522)..(522): n = any nucleotide
  misc_feature (527)..(527): n = any nucleotide
  misc_feature (531)..(531): n = any nucleotide
  misc_feature (549)..(549): n = any nucleotide
agctatcaagagaacaaaacaaagtcattgaccgaggccagctgataccacacaaagatctaatgactgacgcacaagcagggattagcagcagaaacaaaggaatcacacagccactgcagctacatataggagacagaccatattatcctaatgttttgtttatcctagatttttggcatgttttgtgctttcgaatggagaattcgcaatctaagaggctttcgggggttcgtcgccgggcaaatcatcttcgtcatggtatatgttttccgccatctgccatatttgaaggatgttatcctcggcaacactggcaatgacccaatcctcacaggaattccaggagaaatcagatatcttgctagtgtggccgccgtgaataaacagcagctcgggcgggccatcctctgcatcctccggggtctgttcctcgtcgatcctgctaaggtcccacaccatgagcctcctaccaagacagcaagatgctagaattgtntcattttnnggattccaaccaantttgnaaanctcctctttgtggcagtncaatgtatgtaaagcat

SEQ ID NO: 4964 - DNA, 674 bp, Musa acuminata
  misc_feature (617)..(617): n = any nucleotide
  misc_feature (631)..(631): n = any nucleotide
  misc_feature (639)..(639): n = any nucleotide
  misc_feature (651)..(651): n = any nucleotide
  misc_feature (666)..(666): n = any nucleotide
attaaaatcacaatcagaattcgaatgtaagccatcgcgagtgtcttcatacataaggcgatggggccaaaaccttgagacttgcatatgctaacatcgtaaacagtaagatacccacgtgtacaagtatcataatattcgtcacctaaaaaggttctgagagctaatctacagcagcagagacatggggaaggaaagattcgcgtggcttggtgcaggtgactgaagcagagagcaaaaatgactctggccgggacttcaagcgcccttgttgccttgttggaggctgaccaaggcgtggtacgaccctttgggccccttggccagaagcgacgcgtgggtgcccttctccaccaccacccccttgtccaatacagcgatgaggtcgcagttctggatggtgctcagcctgtgcgccaccaccacgctggtcctccccaccatcagcctctccaacgcctcctacaccatcttctccgactgactgtcgagcgcgctcgtggcctcgtccagcagtagtatcgttgggttcttcagtatgggccctcgcaatcgcgatcctctgcttctgcccgccggagagctgtaccccgcggtcgccgagtatgtgtggtagncgtctttgaagagntatgaagncgtgagcagttnaggccctggcgggtnctctatct

SEQ ID NO: 4965 - DNA, 555 bp, Musa acuminata
  misc_feature (5)..(5): n = any nucleotide
  misc_feature (11)..(11): n = any nucleotide
  misc_feature (23)..(23): n = any nucleotide
  misc_feature (29)..(29): n = any nucleotide
  misc_feature (31)..(34): n = any nucleotide
  misc_feature (36)..(38): n = any nucleotide
  misc_feature (46)..(46): n = any nucleotide
  misc_feature (76)..(76): n = any nucleotide
  misc_feature (520)..(520): n = any nucleotide
  misc_feature (544)..(544): n = any nucleotide
  misc_feature (546)..(546): n = any nucleotide
catanacaacnactatgctactntgtcanannnntnnnaacagatnactaatagtctcctccagtggaaactccanatcagttgtgtgtgcaaaattttgtggaacatcatcagtgcatccaccacacaaacgcacacaccaccaggactgtaataaccatacctgtatacgcaatccacttgtccacgcggtgtcgccgctcaattagcttcaacacggtgttagataaccctacggtattaaggatgtccagggccttcctttgggctctcttcaagcgatccctctgctcggcgtacttagacagaacagccactccagtggcatatgcttcttccagcatcattgaagagtttcgtgcggattgcattgcttgtgcttcctcgtcaaatattctcagaatatgcgcagactccccattagctctttccaataattctgcacgttctttagcttcctgcaccctcttttgttgacggaaggatgcttgtaagactttctttcagtgaatccacctcntctgccactgatccacttttctcntncagagatcg

SEQ ID NO: 4966 - DNA, 689 bp, Musa acuminata
  misc_feature (5)..(5): n = any nucleotide
  misc_feature (14)..(15): n = any nucleotide
  misc_feature (638)..(638): n = any nucleotide
atcanaatccattnnctttctgttgtagcctacagatccaactggaactaccaaatacaaaagttctcagcccaaaaaattagattctggatacaaattccctcagtcttaacaaactgaataatttattggtctccaagcatacattggttgctacacccaaatcttacatggctcattaagaaaaggaatcaagatcgcttggcttgacagtccaatgtcctctcggtagagcaataataagtatgtccaaagctaacgcaatatcaatgatgaaatttaccaggtaaacatgcaacataattaaaataacttaaccaaccagttctcttatctgctagcaaaaactggtgtacatgaaccaaaaccttaacgaatcagtttcctccactctgtccggcctcgatttatttcaagaccggtgccagacgatttcaagaaatgcaagaactgctggagctcctgatcatgtggctttgtggtggcaatcccatttgtgctaccattttccgcaaattctgaactggtaagtgaatccactgcatcgtcatgttggcattctcgcctataatctagagtgattgtctgcagctcatgggtgtcaataatttcttgaggcatgctttcaaggacccatncaatgtaagtcacattgtttacgtgtggtcatgtccaaatcagctcttctt

SEQ ID NO: 4967 - DNA, 592 bp, Musa acuminata
  misc_feature (9)..(9): n = any nucleotide
  misc_feature (520)..(520): n = any nucleotide
tttctcaancaccgatattaaaatttagtagcatttttaacaataatgtggcaaattttatgagctaatacttctacaaaatgatcagatagcggataacaaactcaagtctgaaacaaataaaggctcctagaattggaataccgcaaatgcatattgctcattcctcgtcatcctcgtcaccgtcgccaccggctgccttctttgctgcagccttttgattctttctcttcaccctcccggggcgcccaccaccaaatggacttgtgagagagaagtcgatgtgctttgcagagtccaccctcaccatgaacgacgggatgttaaccacttgcctcccgactctgatgtggcgctgcctgatcaggactctggcatggtggatggacttcgccatccccgacttgaagacaagagtctgcagacggcgctccaggaagttctctactgtgagagccaggacgtaatcgagcttgttctggccttcctcgagtagcccatagcggttcatccggcggangagggctctccctcaaaaatccgacgagggttcttctcgtcgagcgtgagaagatcccttgcagcattacga

SEQ ID NO: 4968 - DNA, 500 bp, Musa acuminata
cactagagaaataaagcagactgtcacagtaatccaaacagatcaaatgggtttaaaatgcccaaactgcaccaaatcatagagcacaaaagggtccacataaaagcgaagtgggcttagtagcagtcattaacttgacataaaatatattaattccttaaaccaggaattccaattgatcatggcttcaacaatcaatttctattgttgcttgacttcaactttcttcttctgccagagccgatccaaagcaccatcagcatcaccctgtgctcggatgaagccagaaagtgcaaaagtggtgaactggccggtgtacacaccactctcatccaaatgcccgatattgatctggactgacgcatggtccttggcagtaatcagcctattcgtagcagaacatttcctcgggatgtagagatccgtcatgtcacctgcttcgttctgcattttgtcagtggattctcttgccggcaaaatctcctgaggcgaaagatgag

SEQ ID NO: 4969 - DNA, 824 bp, Musa acuminata
  misc_feature (23)..(23): n = any nucleotide
  misc_feature (780)..(780): n = any nucleotide
cccacttgtcattttatatttanaagatgaggtcccaccaatgcaaaggattaacattacacaaactgtactttctaaccctgaaattatatattttttttctttaactttgctgatgctattattggaatatggacagcagattcggtgttggattcaacaataactagtggcgatccctgtcctcgttgcattacaccggttgccctccggcaccaccactgcacctttctcaaatgtgacactgcaagatgagacagatagttcatgtgaagacactacttcggttggataaggtatgatgcccagactgcatctgcaggtggtggtggccgcacccagtgtccaggtatccggcttcctccaggtctaatataagcatcccaagttcttctaacttcaattagtgtccccatatcattgctgcttccatgataatagtggaggaactcaaatggtaaattttgacacagagtcatagccactaccccaacccggagcttcatcctcttcttcgcttcctcctccaccattgacctcgggatcatcattctctccttcattatcgttcccctcctctccagagaaatcatctttacctccgtcttcctgactgtccccatcctcatcattgtcatcatctgactcgccatcgtccttgttctcgggaacagcttcaggtttgcttcgtcggagtatccctaaaattacttccgatccttcattccgcggaccagtttgacttgatatagagcccaccgccagaataaagcaaaggangactttcagcagccaatacggtctcggcactaacaattcgacca

SEQ ID NO: 4970 - DNA, 543 bp, Musa acuminata
  misc_feature (267)..(289): n = any nucleotide
attactttatctgcttgtaattttacaaaatggaagaagaaaaatgaagtggagtaagacttgactattggataactaatatagcctttttcatttcatcctaggcttttgcagacttctcactccgttgccgaatctgtgatcccaagctgcagctgaaaggaaggctctcgacgaagaagaggagggctgatgcagagctccaaattaaggtcgggacacttgggggctttttgccgctgtgccgatgactcgtcactgctactnnnnnnnnnnnnnnnnnnnnnnntctcttctttcctctccgatgagattgcgatggttgatggcgcacgctcgtcgaacggccggtgagttatagggtccacacctctgctcaataacttcctcctgatgtgtgtgttccagtagttctttatctcgttatctgttctccccggcagtctcgcggctatcagtgaccatctgttgcccagtagacggtggaggttgacgatggtctcatcctctttcctgggtgaagttgccgcgcttgaggtcggg

SEQ ID NO: 4971 - DNA, 607 bp, Musa acuminata
aggagttctttctattatgtttaagcatccacaaaacaaaggtaattaagatggtcttcatagccacctgaagactgcaagtttaattactgcagcatactcactcttcggattaataatactcagaagaagctctgagctttttggcctcccggtgcaactgactgtagcagcaactggttcatcattcttggcttgcttactgccatcaatggtgagtccaaaatggatgtgagggaagtgtgcccaattctttgccgcggtgatgaatgcttctctgtggctgatgtctggattgttagccttaatcctttgtatttcctcctttatgaacctgttatatgcagacggcacgcgatgtctcttctccggaggacgcataggcagcataatttgttgttgatcctttggcacactgtagaataaggaagtgctgttgaacttggaaggtgatccacatgccatcgtcctgccatcatgagctgctgctgcgttgcaggtctggagatcttgaagagggagtttctgaagcaggtctcccatgttcacagatcagcagattacaacaatgcccgcatcgcactggctacaatgctgaacaagctgt

SEQ ID NO: 4972 - DNA, 454 bp, Musa acuminata
  misc_feature (168)..(200): n = any nucleotide
tatttactacctacatagacaacagcaaggacatcggaagcctagcgatcgttacacaacactaaactaaatcgatcgaaccgaaggagatggaggagatctgtcatccatcttcatgcacacgactcctccttgacgtgaatggcttgtgggagatactgcgccatnnnnnnnnnnnnnnnnnnnnnnnnnnnnnnnnnaatggggctcactcttttgcaggccatgatgagctcgccggagagggagatcaccgggaggttctcgcagttgcagatctcgatcatgaagccgtcgggatcatggaaaaacatctggtccacgtagatcccgccttcctccactcgactctggatgtaaggtatgcccatctccctcagcttcttctccaccaaggccaagctctcgcactggaaggagatatggttgtccttggggttaatttccctcttcg

SEQ ID NO: 4973 - DNA, 568 bp, Musa acuminata
cctttatattttcaataaatatgaaaattacaaactgctatgtctgactccaaacatgaggatcaaaaagaatttcaagatttgtggcctcgtcctaagccgagacagcttcctgtttggcagagagttgattctggatgtgctgtgggacaacatcaaactgtgcaagctgcattgtgtaagatgcgcgtccttttgtcatcccacgaagggtgctaacatattggaacatttcggcgagtggtaccaaagcatcgactaccttaagaccacctggcttatcaccaaagctattgatctggcctcttctcgagtttagatcaccaataacatcgcccaagtgttcttctggggtgactacttccactttcatgataggttcaagcaattttggacctgcttttctcatgccatcacggaaagcacccctggctgccagttgaaatgctagaacactggaatcaacttcatgataggagccatcaactaatgccgctctgacatcaacaactgggtagccagctaacacaaccattgcttatggcattcttccagccctttcatgact

SEQ ID NO: 4974 - DNA, 637 bp, Musa acuminata
  misc_feature (19)..(19): n = any nucleotide
  misc_feature (535)..(535): n = any nucleotide
  misc_feature (618)..(618): n = any nucleotide
aagtaaacatttgttattngcatcccatttaggagggccacagaggaagaagcaacacaagattaacaccatgtcagagaaggcaaagcaaacatcaaaggcttgcaactttcccccatacacataacaaagcttgactcatgtcgaacaccttcgcccggaacgacagcacctcaagacatccatctccggagttcaaatcaaaacgattaatcctctgcaagcatgcaatgacaagcttcagttcctccggagacggattcaatggcacaaaaccttcggacgatgctcaagcgggcgtcggccagtctttccggatctcgaagtagtagctcatgtcgaggtagcacttcccgtcatcatccacgaactttgttcttgcagagtaggatcccctcgcgaagtaaccaccgggggtggtctcttcctccagctcgtacgtgtaaggttccttctgagggctaaatgttcccagcatcaccttcgtgctgtcaactttcatcccggtcttccagaccgtgttggtgtagcggancccggagaacgatgttgttggagaacggtgaaggagaacttgaggcggtaacggctttccgtctttgaacgcgaacgcgaaancctttcgcgtcggggacga

SEQ ID NO: 4975 - DNA, 614 bp, Musa acuminata
  misc_feature (567)..(567): n = any nucleotide
  misc_feature (571)..(571): n = any nucleotide
  misc_feature (597)..(597): n = any nucleotide
tagaaatattatttgctaaagatacttcaaaacattcagaaaacaacatggtccttttacgtgccaacacgtttgtttgcagcaacaaagcaataaaaataagcttcatgtgaaaaatgaaaacagccgatgacagctaatctagatgggacatcattttggcttctcagaacacgcatcaagcaactcaaaccaacagcttacttgatcttcttcttgggcctcagctggttgctgtggccgcacttctttttacggcaattaacagcccttggatgcaatcttgccatagcattttctgcagatcatcttttcctgattatatttcctggctagagccatcagagagggctcaatgataccgcccctcagcctcagcaccaaatgcagcgtcgactctttctgaatgttgtagtcggcgagtgtccgtccatcctcgagctgcttcccggcaaagatcagtcgctgctggtccggcggaatcccttctttgtcctggatcttggtcttgacgttgtcgatggtgtcgctgctctcgacctcgagggtgatggtcttccccgtganggtnttcacgaagatctgcatctttgtcantcgttttgctccctctt

SEQ ID NO: 4976 - DNA, 590 bp, Musa acuminata
taaaacaacttttaacaacaagctcacacaatatacgaagcatattcaagatccaatatgaagctatgaacgtcccacttgcgaaccagctaactaagaggaaatcaccactgcacaactcatactcaatttgcacgacctctgatgacatcgagtcccatttcagtaggatcggtcgcttgcagttccacctgtatcccgtctaactctctcttaaacctgtcttttgagcttgcatagagcatcttgcttctcaccctcgaggtgtcgggagaccatgcaatgaagaagatcttgctcttctggcagttctcctcggtcacgaaatcgaagtcgtagatggcatatctgcactcgttgttgggaaggctagcggcaaaatcgtcgtaacccagagtgggctcaccgaccttctccacgataacctgcttcaacttctcatcgatcttgaacactatgaaacggtacgtccgtttcgccttcagttccaagaacttcagcttgcaatcgtcattgacggccatccctgacgccgcgttggccatgtcggaggagcgattaacgaaagagacgggcgccggagagtagta

SEQ ID NO: 4977 - DNA, 631 bp, Musa acuminata
  misc_feature (5)..(5): n = any nucleotide
atganatattatcccacaccaataattgcatgtagtttccagtaatttacaattagattagctatcatatataaaggtccagagaacacgatcagaaatttatctatttagttcttttcctaagaggatcaatccatcgacgagaaaaggagagctgagctatcatccattgaggtcttaagcacgttcaccacggatgcggcggggcgagttggatgtccttgggcatgatggtaacccgcttggcgtggatggcgcagaggttggtgtcctcgaagagccttaccagatacgcctccgccgcctcctgcagcgccaacacagcgtggctctggaaccgaaggtcggtcttgaaatcctgcgcgatctcgcgcaccagccgctggaaaggcagcttccggatcagcagttccgtgctcttctggtacttgcggatctcacgtagagccaccgtccccggtcggtacctgtggggcttcttaacaccgccggtcgtcggcgccgacttcctcgcgggccttggtggcgagctgcttccggggcgctttgccgccggtggacttgcgagcggtctgcttcgtaacggccatcgatcaccaggaacaacacaagctagggttcgccgatctca

SEQ ID NO: 4978 - DNA, 1134 bp, Musa acuminata
  misc_feature (15)..(15): n = any nucleotide
  misc_feature (19)..(19): n = any nucleotide
  misc_feature (21)..(21): n = any nucleotide
  misc_feature (23)..(23): n = any nucleotide
  misc_feature (95)..(95): n = any nucleotide
agcgtccgtcacacnatcnantntaatatcaggtaaagatggaaaaataaaatacaataaaataattaattagaataaaaataaaaataatttangctaactttgactctgtgggtacgcgataggaggaacaacttcgctctcgtccgagcgggtgccaatagcaatacgagacgcgtaaacccacgatgttgtatatgttaggcatgcggcaacggtggcaggcgtcgtttcatcgagcacctggcaggcattggaacgagaaaagggatcaaatacagcaaactaaacagcagaaacaatcacgagtcttcaccaagatcgctcttgatttgcttcccatggttccaatgccatctctatagtaatatccgcatgctccctgctcttaataatccaataaggcttccatttcaaaacgaggggcggcgcatgatttagagtcgtcgatcggaaaaccctaatccttgattcaagaatcatctacacatgcacaattcaattaaaatagttaccgataaaataaagatggacacatataccattcgatcggcagtcctatatgatctcctctaatttaacaggtcaaatctcttgaacaaagatgctaagattaaccaagcgagaatccacgccagaattaggcgcgttcgccgcgggtgcggcggggcgagctggatgtccttgggcatgatggtgacccgcttagcgtggatggcgcagaggttggtgtcctcgaagagccccaccaggtacgcctccgccgcctcctgcagcaccagcaccgcgtggctctggaaccgcaggtccgtcttgaagtcctgcgcgatctccctcaccagccgctggaacggcagcttcctgatcagcaactccgtgctcttctggtacttcctaatctcacgcagcgccaccgtcccggggccgataacctgtggggcttcttcacgccgcccgtcgtcggcgccgacttcctcgcagccttggtcgcgagctgcttccggggagccttgccaccggtggacttacgagcggtctgcttcgtacgagccatcgagcgcggaacaaggagaagacgagactagggtttgacgatcccaaactacagatcaagcagataataaattaataagg

SEQ ID NO: 4979 - DNA, 542 bp, Musa acuminata
tcggacaacaactacataaagcaaattctacaaagatccatgattagcaatacacgataaattgtgttttctttaatcttcttctgattgattctcactttgccactaatcttattcaatcaaccaatgggtatgccccgctggcacggacttccttgaccctcttttcgtattcatcttcttcctcgacattgttatcttgttcttcttgcttgccttcatcctccccagccggccaaccaaaacctgccacaggtgtgcttgacggtggaggagtccgtgcttcgccccacaatcctcattatctcctcgacactctgcagagaataggtaggggcatcattatcccgcttgtagtattgcgcttgcgctgcttcagttagctctctaggcaggttcttcaagaaccagggatggttccttatttcccttatagtaattctcctttctgggttggcaacgaagatccttgataggatttgcctgcaatcttgggaggtatgaacatattcaggtatcttgtactgtgctgacactattct

SEQ ID NO: 4980 - DNA, 549 bp, Musa acuminata
  misc_feature (496)..(496): n = any nucleotide
caaacagggcatggaggttccctccaacatatagaatgggagttcccaatggaaattgacaaccagaagaacatgaaatgattgagtaaacagagtcccagaacaaagagaaagtgtaagttctgcattatttcactgttcatggtttccagaggatggtggtctcggcaatcatggaggtcacaacatagggatccatgtttgacgctggcctccggtcctcgaaataacctgcacatatggcacacagccatcacaacaaagtttgactatgcagttgcatgccaagttgatgcagtaaaaactatcaagaaatgtacaaaaagaaaaaaaatgtagggaaggaatctgacctttgccattttgctctgtctcacgaccaactcgaatggatgcaccgcgattagcaactccccatatgaaggtgttgatgtcagcagtctcatgtcgtccagtgaggcggcgttcattgccttctccatatgcagcaatgtgntcccttgtgctcttgcaagttttcaatagcactcttgatgattcatatctcca

SEQ ID NO: 4981 - DNA, 631 bp, Musa acuminata
  misc_feature (7)..(7): n = any nucleotide
  misc_feature (609)..(609): n = any nucleotide
aaacaanaagatggatattatttatgcgtaaatattgctgcagatttcaataggtctgaatggcaaacaagagcattccctgtcgaggaagctcttacaaaaatataggctgcatcgatcaagaagaaacaacactaccacctcgcttactgggatcatcctcgcactaagaggatgaaaatggaggctagcaaacatagataacagatctaggaatggatcaccgtagttaaaagttcttggcatggaagtgggagagcagagatgctggtcagacgagcttcccttcacactgatacatgtgctgtttgctggtctccgaaccgtgctctgcctgcggggacttgtcggcctaagttgagccaggactggctggactctggcttgggcctccttggtggccgccgacgagccatggacttgatacggcgccttggtgttgattctgaaacatgttgttaacagagacaagaacgtgaggtttcagctgtggtactacatcatggacactcgagattgaagtacgcaccggtccttcctcttctcgaggaacctatggagggagttcttcctcgctatgggcatatcagaagcggtggccttggcgangctatcggccggtgagatgggg

SEQ ID NO: 4982 - DNA, 623 bp, Musa acuminata
  misc_feature (6)..(7): n = any nucleotide
  misc_feature (12)..(12): n = any nucleotide
  misc_feature (15)..(15): n = any nucleotide
ctaacnntcacngcnctgcaacacacaaatttcacatgaatacaaatatccatatggcagctaaaagagacatacaagcatgtccttcatggtacaaacataaccaagtccatctcaagccaagctgggaaaaagagaatcagctcaagcttcctccccttcctcttcctcttcctcataatcttccacatcagctgttgcatcctgatactgctgatactctgccaccaagtcattcatattgctctcggcctcagtgaactccatctcgtccatgccctcgccagtgtaccagtgcaagaaagccttcctcctgaacatggcggtgaactgctcgctcacccgcctgaacatctcctggatggaggttgagttcccaatgaaagtggatgccatcttcagccccttgggtggaatgtcacacacactggatttgacattgtttggtatccactcgacgaagtaggagctgttcttgttctgaacattgatcatctgctcatcgacctccttggtgctcatctttccacggaacatggctgaggcggtcaggtaacggccgtgacgggggtcggcggcacacatcatgttcttggcatcccacatctgttgggtcaactcag

SEQ ID NO: 4983 - DNA, 598 bp, Musa acuminata
  misc_feature (4)..(5): n = any nucleotide
  misc_feature (8)..(8): n = any nucleotide
  misc_feature (13)..(13): n = any nucleotide
cccnncgngatancattctcagtgacagtttttattaaggttaaattgatcagctcacaaagctatcgttacaacaaatcgagcaaaatgatacaacagttcggtcccataggcgaataggaattgaatgccacaaagcaagcaggtgtcggtagagctctaactaacatgagcaatgtctgtgtcctccggaatcttgaatgtctctgctgcaccaaatttcctcctccctccttcccactcatcctcggattccggactgctgtccccgtcatcatgatggctcgccgatgatggtgtcaaggggtcatcgatgctcttggagatgcagttgtgggttgcaagcattttgacctgacggagatgagagatctctacgacaaccgtgtcgtcatccaccggtagaggctgcttccatggctccccatcgattcgcatgaatgtgtgatccgctgcacccttgtggaactcgaaccgaattcttcgtgcctgtgcaagacgggttccatgcccatttggggtgaacaaaacaagcccatgccatgcgtcccggaaaccgacaacctcaagaaggccgtcatcaacataaggtggagta

SEQ ID NO: 4984 - DNA, 602 bp, Musa acuminata
  misc_feature (10)..(10): n = any nucleotide
cattgagttngactttatcaccgcgataaatcagaagaaacactgaccaccatcacgatcatgatcgaccagagattacacacgaaggagcacaccaccatctcgtgatcttggatgtatggagatggagtcagagatggatcgaggacttgaatcaaggaacaggagcagagagaaataaggataaacaacaaggtgcatgatcgaaggaagcaaagtgcacggacttttcgaaacaagtacgtaggagcgccgacgacttcgacagccgcctcagtagtcggtggtcgggagctgctcgtgggagtggctgatgaagaagaactcgtagacgatcccggcgaggccgccgccgatgagcggaccgagccagtagatccactggtgggtccaggaccagctgacgagggccgggccgaaggacacggcggggttcatggaggcgccgctgaagggcccgcccacgaggatgttggcgcccaacgatgaagccgatggcgatgggggcgatggtgccgaggctgcccttcttggggtccacggcggtggcgtagacggtgtacacgaggccgaaggtcatgacgatctccagcaccagcgcc

SEQ ID NO: 4985 - DNA, 564 bp, Musa acuminata
  misc_feature (5)..(5): n = any nucleotide
  misc_feature (7)..(8): n = any nucleotide
  misc_feature (16)..(19): n = any nucleotide
  misc_feature (21)..(21): n = any nucleotide
  misc_feature (24)..(24): n = any nucleotide
  misc_feature (34)..(35): n = any nucleotide
  misc_feature (38)..(38): n = any nucleotide
  misc_feature (73)..(73): n = any nucleotide
  misc_feature (82)..(82): n = any nucleotide
  misc_feature (95)..(95): n = any nucleotide
  misc_feature (134)..(134): n = any nucleotide
  misc_feature (153)..(153): n = any nucleotide
  misc_feature (178)..(178): n = any nucleotide
  misc_feature (188)..(188): n = any nucleotide
  misc_feature (392)..(392): n = any nucleotide
  misc_feature (431)..(431): n = any nucleotide
  misc_feature (552)..(552): n = any nucleotide
atttntnnatgcattnnnntnggnacatgtactnncanacgtagaccaagtatcgatgtatcagatataatgncaccacagnagtatcataagantgtgtacaagagaataggaaccagaaatacacatagaanataacaattttgttttttntttccccaccatttaatagcttgcngatgaacagngcagtaggatctatcaaacccagactttctgccagcatttaatgtataccaaatcatttttacatgatccagactcacttccttttaccatcattaacctcactagttactacattgccatctcagcttgcaatgcagcaagttcgtcttcttcagcagtatttttctggggagcaagtcgggctggtactctaccagcaggancataaactggagaagaaggaagcagttgaagcaggctgnagaagctgttcctccaattctgctccctccagctcttccagttctgcttccaattcatcttcatcaaaatcagctgcagctccaataggagtggctaatgcttcctgaatttgtttctgtnctctgtctgttc

SEQ ID NO: 4986 - DNA, 353 bp, Musa acuminata
  misc_feature (38)..(38): n = any nucleotide
  misc_feature (45)..(45): n = any nucleotide
  misc_feature (49)..(49): n = any nucleotide
  misc_feature (56)..(57): n = any nucleotide
  misc_feature (93)..(93): n = any nucleotide
  misc_feature (139)..(139): n = any nucleotide
  misc_feature (142)..(142): n = any nucleotide
  misc_feature (148)..(148): n = any nucleotide
  misc_feature (181)..(181): n = any nucleotide
  misc_feature (193)..(193): n = any nucleotide
  misc_feature (207)..(207): n = any nucleotide
  misc_feature (218)..(218): n = any nucleotide
  misc_feature (227)..(227): n = any nucleotide
  misc_feature (235)..(235): n = any nucleotide
  misc_feature (246)..(246): n = any nucleotide
  misc_feature (279)..(279): n = any nucleotide
  misc_feature (287)..(287): n = any nucleotide
  misc_feature (292)..(292): n = any nucleotide
  misc_feature (295)..(295): n = any nucleotide
  misc_feature (299)..(299): n = any nucleotide
  misc_feature (316)..(316): n = any nucleotide
  misc_feature (344)..(344): n = any nucleotide
aaaatagactttttggttttcatgtcacgtcctgaacngagatgntatntgttagnntttatgagggtaggatggacattctaagggctgttntaattggaccacctggaactccatatcatgatggccttttcttctncgncacttnctttcctccgaactatccccaaacccctccganggttcattatcnttctggtgggctcngactaaacccnaaacttganatgcttangggaaggtttngccttaagccttctgaatcacatggcctgggcngtggatgngaaancanggantccttaaattcaacaangctgcaggtcttgatctctattcaggcncttgttctc

SEQ ID NO: 4987 - DNA, 333 bp, Musa acuminata
  misc_feature (12)..(12): n = any nucleotide
  misc_feature (119)..(119): n = any nucleotide
  misc_feature (186)..(186): n = any nucleotide
  misc_feature (197)..(197): n = any nucleotide
  misc_feature (288)..(288): n = any nucleotide
  misc_feature (309)..(309): n = any nucleotide
tcctatttcctnatcacgaaatttaatccgtcgactccacattgcttgtaagtgagcgattgcctcctggggctgatcacgatcgcacaatccaccgatacctacttgatttaaataantagtaaccttaatttctgtaacatattatttaatttttatctaaagaaattggaatgttgggtaggnatcgggcaganagagcggagggtgaagggcgtcacctgaaccctagggggtggagacgccgaggacgaggatcttcgcggagacgtcgccggtgaggcggangtcgacgcggtcgttgagganggcgtcccgaacgaggtcgagggc

SEQ ID NO: 4988 - DNA, 324 bp, Musa acuminata
  misc_feature (7)..(7): n = any nucleotide
  misc_feature (133)..(133): n = any nucleotide
  misc_feature (316)..(316): n = any nucleotide
aatttgntcatctagattggaacaaaagatagaaaaaggctggcatttaaagtgaaattacaaaagggaaaaagaagtcctagcacaaaaaaggagtaaactttgcaccatctcaagtcatctaaaacctgtngcaatgtggatgatgtacttatcagctcctgcatgaaagtgtgttccgccaccagggaaattgatctttgtcacccattggacgaccatccaccttctgtcagacttctcctccggcaaagatgtgtatgggggatgtttgccttccacacctgatcccggctttgcaggccagcttattggnaccttgta

SEQ ID NO: 4989 - DNA, 300 bp, Musa acuminata
  misc_feature (10)..(10): n = any nucleotide
  misc_feature (13)..(13): n = any nucleotide
  misc_feature (15)..(15): n = any nucleotide
tattttaatnatnantgatcagtaataatacaaaccaataatggcgcacgcaaaagaactttcctgaactccaccccacgcacacaccaagccactaataaacttaccattcgcgggtccctctcaggaatcagatttccaatggtcgggcctgagtgtcatatccttgaggcagctgagagatgaagttgtgggcattggctgccttggctgcagccaccaccacatccatggtggcgtcttccttcccgaagagtatgttctccttgatggaggtggcgaacaaagctggctcctggc

SEQ ID NO: 4990 - DNA, 255 bp, Musa acuminata
gtgctgtgtctttgctcatttcagattttcaggacaacattgatgcaaaggttattgtagctggtttgtcaacaacatgcagtcagaagattcataatcagttagttggtgtggaaagaatgcataaagagagcaagtacgtgttgttcctggatgatgatgttaggctccatcctggatcaataggagcccttacatcagaaatggagaaaaatcctgagattttcattcaaacgggttatcctcttgatttgc

SEQ ID NO: 4991 - DNA, 631 bp, Musa acuminata
  misc_feature (2)..(2): n = any nucleotide
  misc_feature (8)..(8): n = any nucleotide
  misc_feature (594)..(594): n = any nucleotide
cnaagtcncatgtatctataaaaataacttgcctccttcacattgacaacatgctttcctctgcaaacaaataaacgagtcacatgctctcgctcatttatctcagtatgtttaaacccagatgaaataccaccatcctgtggtattatacatggtttgaaataagaaaggaacttctcagtctcatgaccttggacttcacgatattgaacagcacgaccaccgagggctgcgtcaagttcaaccgtcttgattgcagcagtcccagcttcatcctggctagtatctttaccaagccaatagtgaatatcatgttgaagagaaccactttttaaggcagttgtcttaagaatcacatatgaatctccagtgaaaaacttcccataagatgaactcggtacagggactgggtgaaaattttcaatacgccatatctccagtccagccttttgcccagctccttgaaaagctgaatccacatccttcatggacactgccatactggaaggactagctttggatgttgtcttaaagctagaagaagcaaaattctgcggtggctaagatcgtgcggcgacaccgacgcaggtagangggcgcacgtcgggaggctagtcgtcgaccgatcgat

SEQ ID NO: 4992 - DNA, 156 bp, Musa acuminata
  misc_feature (39)..(39): n = any nucleotide
ctaggcatactttcatcattcttcttcaaatatgccganacaatcttgaagaagtattcatctactgttgccacaacttttactggcatcgcatctgctgcattatttggtcatacattgaccatgaacttcatcttggggttatccatagttttt

SEQ ID NO: 4993 - DNA, 622 bp, Musa acuminata
  misc_feature (4)..(4): n = any nucleotide
  misc_feature (9)..(9): n = any nucleotide
  misc_feature (358)..(358): n = any nucleotide
attntgctncaatgtgaatagacaactaactagtttatatccatatttacaatgtcataaatctggagaaatggcctcccttcttgcaggaggagatcttctttcacgtcactaattacacagtattaagaatttttagcttgtttgatgcccacaaaaaagcctactcttttatgttcttccaatggcacatcattcaggtagagtcatcaaaacaactttgatataacgcgacaagaggaccagaaggctacagatgctgccctgattattgctggattctggtatatcccaatagcagttgcaccccaagaagcaacattgtaaatgactttgcttccatcccatgccttctgangcttgctcttcttcttctttccagaaaatgttttgcatagggcatcttgaagctgatttggagttaattctttagtttgctttagtgctagtaggtaggcagccatgaaggatgtatgccatccacaatgtcctcttgctgacaagaacataatcatcttggtctgagtcgttcccttcatcaacaggcctatcttcccgcaagtctgcggcggtaatcacatcccaagtgatcatcatcatgacattattgcaacagatgctg

SEQ ID NO: 4994 - DNA, 621 bp, Musa acuminata
  misc_feature (3)..(3): n = any nucleotide
  misc_feature (12)..(13): n = any nucleotide
  misc_feature (303)..(303): n = any nucleotide
  misc_feature (305)..(305): n = any nucleotide
  misc_feature (510)..(510): n = any nucleotide
ttngaattatanntagataaaactgtgttccgactatatctgttacaagtaattgaatcactaaaaagtgaagtgcccttctctacaaaacaaaaaaaaggggaaaaaagacggctgagattcattttacaatagcttatatggcagatgacccgagcatcttccaagatcaaatgaagatgtgacgagtaatcgaacctacccaaagcttaattagtctgaagttgttttgaaccaccacccgttggatgctttacaggacaccacaatttgagaatatcagattcaccgcacatcgcttgntnaaccctcgaccggttgtagccgtcttttcctgcttcacagctcaattccagctccaactaatgcagctgtgactgtggccgatgcttcttcaagtgtccgtcgctttttcactgtattgaaggcctcaataacatctccagcttcccaatcatcaaaatcattaacactaataccacactcgagcccagcaccaacctcctttanatcttccttcacccgtcgaagagaatcattgtgccagtatgaactgtctttccgtttcgaacaacccgaacaccacagtctttcaccacctttccttcagtgacatgcatc

SEQ ID NO: 4995 - DNA, 621 bp, Musa acuminata
  misc_feature (19)..(19): n = any nucleotide
  misc_feature (161)..(161): n = any nucleotide
  misc_feature (181)..(182): n = any nucleotide
  misc_feature (185)..(185): n = any nucleotide
  misc_feature (192)..(192): n = any nucleotide
  misc_feature (221)..(221): n = any nucleotide
  misc_feature (592)..(592): n = any nucleotide
tctttagtataagttgtgntccaaaggtctgtcaccacagaataaaacctgcatcctgtccctttcacaacatcagacacaaatcatgcttctttagacactctgttttagccatggcacaggtctccttggcctggaccgtgtactatattatatttttnactaataaccaaatactggnngtnaattganccaaatactttttacctaaaacgattatnatgtgattacttgcactgtctcaggcggaaattctcctccgacaagagagacagcataagtcgctccagcctgattgcaccaggacctggtcgaaggatggtggtattcccaatgaccaggcagggatcactgccgttttctctactccctacgcaccaccctcctagaacaatcatgtttggccgacggaacaatagctcagcgtcgatcttgtcgagtataggatggtccctgcggaacttccgtgcaaatggtgcattgctatctactatgtgcgacatgtcattaatgctgaggtagtgcgggtgctgcttcggaggattatcccatgagatgaagtggaggtcatgattgacagtggtattgcggnattccttgcgtgcatatgacagtgtggaa

SEQ ID NO: 4996 - DNA, 620 bp, Musa acuminata
  misc_feature (14)..(14): n = any nucleotide
  misc_feature (18)..(18): n = any nucleotide
  misc_feature (175)..(175): n = any nucleotide
  misc_feature (218)..(218): n = any nucleotide
tttgcatacatgtntganagtaccacaagattggatcaccagattggggtgtgcttaacgaagcgcaggtcgaccgaggacggaggttaacgctaaacagggactgtcctgccgtaaggagcaggggaggaggtgtcctgctcctcttcgttctcgccggacatttcctccagcnatttgcccttcgactcgggcaccaggaaggtaaagataaggcncacaagattggatgccgcgagcacgaagagcgcgttgcggacgccgatgccggcagggtaccccttgtcccgcttcgtcggatcccggctctgcgccgcgtacaggaatccgaaggcgcccacgatggccccggccttgcccgcggctgccgagatgccgtggcatgtggaccgcagccgcgccgggaagatctccgccggcacgatgaaggtggtgctgttgggcccgaagttggcgaagaagaaggtgaacccgtacatgacgacgaagccgatgtggttgcccgaggtggtccagtgatggtaggggatggcgaggccgagcatgaacacggtcatgaagaagaagccatgagtggatggcgaaccggccatggtgtcatgaaggcgacgtgaaccagt

SEQ ID NO: 4997 - DNA, 618 bp, Musa acuminata
  misc_feature (142)..(143): n = any nucleotide
  misc_feature (177)..(177): n = any nucleotide
  misc_feature (230)..(230): n = any nucleotide
  misc_feature (249)..(249): n = any nucleotide
  misc_feature (358)..(358): n = any nucleotide
  misc_feature (380)..(380): n = any nucleotide
  misc_feature (402)..(402): n = any nucleotide
  misc_feature (404)..(405): n = any nucleotide
  misc_feature (457)..(457): n = any nucleotide
  misc_feature (542)..(542): n = any nucleotide
  misc_feature (605)..(605): n = any nucleotide
attcaacttaaaatataccaaatggaaaaacacactatttgagaacaagagaaggaatatggtgagctgtctctctcaatgaaggattatgtacactcgcatttggtaatgtaggactgaactcgagaacatccatgagaannagcaaagaaaaggtaaaataccaaaatagaaagnattcaaagccaccctgactcaaaatatcacatctttatacaaccacctcttgnaatcctaactatagaaggnaaaagaaggaaaagaaaccaataatctcaaactccccgacagtttcgcgacgagttcagcccaaaatccagctcaggctgatgaagagttggaaataacaataccaagncacatttgagtgcccaaagggntcagatccaactctcggaatangnngaaaacggtgatcgaccaaaaaaagactttttgtcccagcaaaacctcacgnttccaccaacttgcggtgttccatcgttctttaccttctgttctggaccagaccttgatctgcttgggctcgatgttggagaggntgggacactctcgtataagctgctgccgcttcagggagctcggcttggggcactcgctgtagnccctctcgagcgc

SEQ ID NO: 4998 - DNA, 617 bp, Musa acuminata
  misc_feature (15)..(15): n = any nucleotide
  misc_feature (521)..(521): n = any nucleotide
taatgttgtacatgngaggcactaagcgggaatgcatccctcaacattctacaatgcctaacataattccagagcatgtcgggcaccaatgtttcactgcagcagtaatacttcctgcacagtgcatcctaaaggcaaccatgtggtgaatacatataacaaaatctgcagtcagtagtctacactgtatctgcccctgcctaaaatttgctgacattcaaaaaggtcacaatgccacaaagctatgacgacgacgatgccacagcctctcgaacaccatctcccatcatatgcatcaaaggtatcagcacaacaaacttgagagcaggtagatgcttatgtactcaatattgttgctcaaaattagccaaaatagcctcgacaatttggagatccacacaggcacttcttagctctctgcgatataaagccagttccaattttctgttgaccagcttcatctccatgcagaccataatcatatgtcagttcagtcatgggaggaatgtgtttgattgcanagaacattatatgtggatactcttcatcaccatgatcatatagaactggttgccaaagacattaggcgagagctatgatcataaaacgtgtatgtt

SEQ ID NO: 4999 - DNA, 616 bp, Musa acuminata
gtatttgattcggtcgagaggagaagcgaaatcggaaaagagaacgagaagatggggtatttgtacaccgatttcgtggatttgatgaagaagccggcggtggcggaaaccctgatcgacatcctcctctgcgcggtgcctatctgggtggcagtgatgatcgggttggtcatcggctggtcgtggcgcccgcgctggacggggctgctcttcttgggccttaggagcaagctccggttcctgtggacggcacccccgggcctgggcgctcgctgcctctggtttgccttcacagccctctcggtcttctccgtgtgccacaagctgtgctcgtcctcgatctttaaggggaaggctgggaggtcccaagacgtcgaggaggattcttcggtggcgaagacggcggcttcgcagattttgccggtggttgaaggggatggcggcaggtctagttcgaacattggactatctatgagtgaacacgaaattgtgactgagaaagatctaaagcatctattgcatcttctagatggtaaagttggagatacagtctggcaaaatctaatggaacgcaccacatcaaacatgatctatcaagcatggatcatgaacctga

SEQ ID NO: 5000 - DNA, 615 bp, Musa acuminata
  misc_feature (3)..(3): n = any nucleotide
  misc_feature (13)..(13): n = any nucleotide
  misc_feature (576)..(576): n = any nucleotide
tcntttcttcatnaagatcctccaccttgccttcctcagtgtctttcttgtcttcctcatcctcatcatcagaaatttccttctcagtggtcttctcagtccaaagggaaatagggtagctgatgaactcagaatgcttcttgatgagatccttgaggcggcgctcctcaagatactccaactgatcctccttgaggaaaagtgtaatctttgtccccctaccaagactctcaccagaaacatccctggttacggtgaatgaacccccggcctgtgactcccacacgtactgttcatcgtcgttgtgcttggtggtgacaacaaccctctccgccacgaggtaggccgaatagaaccccacaccaaactgaccgatcatactgacatcggccccagcagcaagggcttccatgaactctttggtgcccgacctggcgatggtaccaagattgttgacaaggtcagatttagtcatgccgatgccactgtcgatgatagataaggtattggtagccttgtcggggataatatggatgaacagctccggttgcgcgtcgagttagtcttgtcggtgangctctcgaaccggatcttgtccaacgatcggaggagttg

SEQ ID NO: 5001 - DNA, 613 bp, Musa acuminata
  misc_feature (4)..(5): n = any nucleotide
  misc_feature (9)..(10): n = any nucleotide
cccnngacnncgacaattattttgtagttttgacttggagccaactacaggctaatcgacattcctgtcagcaattgcttgaacagtaatattttaaagatctacgttctgacacaattcaattctgcgtctctgaaccgccatctttcacgggcctatgcgagtaacatgggtggctaccagaatgaaggctttgttgaagttcttgctgcgcaacagagtccagagaacccaaactggtttcagggtactgctgatgctgtaaggcaatacctgtggctctttgaagagcacaatgtcatggagtatctaattcttgccggagaccatttgtatcgcatggactacgagaagttcattcaagcgcacagagaaacaaacgctgatattactgtggctgcgcttccaatggatgaaaaacgtgcaactgcttttggtctgatgaaaattgatgaagaaggacggataattgaatttgcagaaaagccaaaaggagatcagctgaaggcgatgaaggttgataccacaattttaggcctggacaatgaaagagcaaagagatgcctttcattgctagtatgggtatctatgtgatcagccaggatataatgtt

SEQ ID NO: 5002 - DNA, 612 bp, Musa acuminata
attcactgtcatgataaaacagaacaaaggactccaaagttacaaagacacaaaatggctggaacaagacaaccacaagcttgtttctcttacagaagcttcagctttatccctccacgctcttctatggagagattatatggtcaaagtgacacagggaactaaaaccactcattaagagagccctaccagttaaaaaggatgattatatgatgccaaagtatacaaagaagtgaggagtttgagtttctatggacaattagagtttctaccaggaccgccatagtagaagaagtgcccccagtgattactattgcctgtctgcacatcatagcagttggattgctcagtgaaggtgccaactcctctaggtgccttcaaattgttggattcatcaactatctgtatgtttctgaagtagcttgatctgccgaatccttcttcagggaaatggccactgcccatcgcggtcgaggtgtgctcaccatctggttctgagttcacaacttcccctccccattccaccatggaagcactgtccgccaagtaagagaaaaggaaagaaggccagtaacctagcacatagtcgttcccaaactgcatccaccaatg

SEQ ID NO: 5003 - DNA, 610 bp, Musa acuminata
acaaaaattactgatacatctcaagtttggtgggatgaactcaaaagatgaaaatacagtgatgatgtgtgaaatattctgaaaggttgaggtttagaaactgcattgccattgatttgggcatgaaaaatcatgaaagtaaagcaaatatcgaaggttctcttacatttttcattaagaatgacgatcaaggaacttctcaattaggaccgagaatgctgcaaaacctgcacaaccaacgcatgcagccttcggaccaccttttgcagaaatagcccctcctgtaacacaaccagcaacaaatgtatttgtggtgtcatgttttgctcgagccttctctataacacactcagcagctgagaaaataaagcccatgacagcaaatgcctttgcagagctataacttctccgccccatttgttttgctgtatatatgaattgctgctttgccgtcatctcatcctgcattataggttatccagagccccaagaaacaagcccatgaatagaccaagtccaccacccatgatgccactgacgacgctgcggacggcgcagttgttccagatgtcctggctcgtatctctccgggtcggagcgagggtctatc

SEQ ID NO: 5004 - DNA, 604 bp, Musa acuminata
  misc_feature (7)..(7): n = any nucleotide
tgtttgntctgcataaaaggggcaatgttgggattatttggcctagcctccatgtcctacatgggtcttacttgcttattccagttatcacatacaccacatttttctctagaaagcacggcatacatttttcgccgaatagttcaaacataacgaacactacatcacaaactcagtaacatatggttgaaacacacaacttagtatttctcccaaaacgagagagaagttattacactcagctgcccaaccatatgtgaacacatcatgcatcgccggatccaacaattctcattttgagatcataagttttggcaaacaattcctctctgttttccttgaaaagaagataccgtgagctgaaccaaaccgtgtatccgaggcccaccatctccagtattcttgggagcaaggggatggagtcaattgctgaaacaacagcggacaaaacccatccggcaaagaaagcaccggtgccatatatgacatatgtggccatctccttgaagcccaacttgtcggcagccacctcgtcaccgacgatgtccaccgccaccaggttgtgcccgaacggcgtggcgcggccatccttattgcatccgta

SEQ ID NO: 5005 - DNA, 602 bp, Musa acuminata
  misc_feature (11)..(11): n = any nucleotide
  misc_feature (16)..(16): n = any nucleotide
  misc_feature (19)..(19): n = any nucleotide
  misc_feature (147)..(147): n = any nucleotide
  misc_feature (302)..(302): n = any nucleotide
  misc_feature (389)..(389): n = any nucleotide
  misc_feature (402)..(402): n = any nucleotide
  misc_feature (416)..(416): n = any nucleotide
  misc_feature (466)..(466): n = any nucleotide
  misc_feature (491)..(491): n = any nucleotide
  misc_feature (509)..(509): n = any nucleotide
  misc_feature (551)..(551): n = any nucleotide
atgtggccatnagctngcncaggattttcaatcatgaggagaacagcttctattgcatccttgatgtagacaaaagttctttgggactgaccaccatcgacaagtttcagaggctcacgtcgcaggagattattactgaagcatgcnaaaaccctgggaacaccctcgctaggaccatcgattccagggataaagtccatccttggtccaatccaattaaaaggtctcacaatggtgaattcaagaccattctccgcaccctcagcataaatcagcctctcaataagttgctttgcacatgnataagaccatctctgcttctcgatagaaccaaaaatgcatggggaggcatcttccttaagtacatagaagtcgggttcctttcttanagggtgatccttnggaaggaagctgcnaattgttttcccatacacttcacaagtggagaagtgaatcaggcgcttgntgttttctgagcagtatctaacaantgggagagcatcgatganattactgtagatggtgtctagtggacgggtgtataatccgcnggtgtacatattgctgccaggttgatcgtcagattcggacatcttgatgag

SEQ ID NO: 5006 - DNA, 601 bp, Musa acuminata
  misc_feature (7)..(8): n = any nucleotide
  misc_feature (11)..(12): n = any nucleotide
  misc_feature (14)..(14): n = any nucleotide
  misc_feature (23)..(23): n = any nucleotide
  misc_feature (28)..(28): n = any nucleotide
  misc_feature (32)..(32): n = any nucleotide
  misc_feature (507)..(507): n = any nucleotide
ccccccnnccnncncccgacttnacaanagtnagggacacaatctcataataatttgtttgaaatatcttctcctctcttctctcttgcaaacgaaaagacttactaatctgctatcaaaacgctcaaattctatgtgcacctcattgactaaggatagatcgagaataagccactataatggacgaatggcctacatgtcacacaccatacaactcttgcgacaattcccagcagtctcattgtttccgatcatgtagaggggattcttttcgcactctcctgcagcagcccatcgaggacaaaactcgcttgcatccgagcaatcccctcttgtgcttgtcctctgtggatcctcaaaggacctgacatggatccattttggtgctgaccacttctcaccttctatgacagggcagcttccatgtaaactggctggatctgttgtgccatcgatgtgaagactgaagaagagtacagcatcacccttgtgaggtttcactgcaangccatttcttgcacactcagaccaggtttcatctttatgctgagatgaagcaccctctgcattggaaaaacagtctcccaccctttttcacagt

SEQ ID NO: 5007 - DNA, 601 bp, Musa acuminata
  misc_feature (3)..(4): n = any nucleotide
  misc_feature (18)..(18): n = any nucleotide
  misc_feature (442)..(442): n = any nucleotide
canntgttttcgttaacnggttatttcatctaacaaatacattttgtcactgaaactgtactcctcaatcaccaagaatgatactttcaagaatttcatcacactgtgctaaccaactaatctgaacatgaataaaattggcatttaaacattatccaccataatcagaatgcccaagaaaatgctcataccgtgtcccattgagcatcttggaaacatcttcccagtttgtaacttgctctggtaggggcctggtgtgaatcttcacttgccgactcactaatttcctctcaggaacactgagaaattcttgtacatgagataaagcattttgattgccgatgatctcttcgtaatacaatacaatgtggcgcatgctgctaaagaaatgcaggcaatcggctatcgtcctctcaacatagctgaaattggccatcagaantgccacattgattgtgggcttgaatcgtgccagaacctcagcctcttctgttgaatgaacatgtgatttgtgaataccatttagctgctttgcatatctatcgtaatcattagcgagcaagaataagcctcgtaagatgttctccgaaaagaaaatgat

SEQ ID NO: 5008 - DNA, 600 bp, Musa acuminata
  misc_feature (2)..(2): n = any nucleotide
antccgtctaaagcatattaaaatccgtagcaacagaatgagtctatctagaaatagaatcaccataatcttcagcagcagcaacacacaacactggtgccagaacagattaacaactaaagcatacccttagggaatttagtcacaactagtccatcttgtcatgccaacaatatgatcagcttagcttgtatttggaaattttgcctcgtattgctggagggacatgaaagtagctgtgatcatctttccagcaaaccacctcccatggagtgcattctgtgctttcatggctgaggttatattgtcaaagcgtaggtatacatagccagcactatttttgtccacagaaatgtgttttactgtgccaaacttggagcattcatcttgaacatcgtccttgatatctaaatcaaaatctggttccgcctccacactaggatcaaacatatttttcaacagtaaacattcactaggaactccagcagtctgtaaagcaggtgcagttgctgaagcaactggaagacctgaagctggaaggcctgcgagtgaaggccagaaggttgcaggatggaggaaactagaggaggaccaagaact

SEQ ID NO: 5009 - DNA, 597 bp, Musa acuminata
  misc_feature (12)..(13): n = any nucleotide
  misc_feature (350)..(350): n = any nucleotide
  misc_feature (401)..(401): n = any nucleotide
  misc_feature (440)..(440): n = any nucleotide
  misc_feature (479)..(479): n = any nucleotide
  misc_feature (522)..(522): n = any nucleotide
  misc_feature (536)..(536): n = any nucleotide
  misc_feature (539)..(539): n = any nucleotide
  misc_feature (552)..(552): n = any nucleotide
  misc_feature (554)..(554): n = any nucleotide
gttgctttatgnngccccccaaagacaattgccatccaagtgtgacaaaccatcgagcagcttgcaagcacaagaggcatgccttatttggcagaaggaaaatggcagaagcagcgtcccaagacataacaacatattacagagaaagcagatgatctacttatcatcggagaggtggcagagctccacctgctcccacgactccaagctcttgtcctcggtgtcggtcttgtagagggcgagcgccgagacctcgaagctgaggctgaggatctccttgtccaacgcctcaaccctctgccgagccctctccttctcctcctccgtcagtccccgtacaagaggctcanatggggcatatatggagtcgcgttctcgtatccgaagtggccgcaagacanggcgctggtttccaccacctcgggactgggatcgatgangaggaagacgcactggtataagaatgcgccacgggaganctgcggagacgcgggcggggtacgggtagagcgcggtaaggcngaacggaagcggcnganggcatcgtcgggncnagggaattgcccgacaacggtgatgtgggggtccaatttgggg

SEQ ID NO: 5010 - DNA, 595 bp, Musa acuminata
  misc_feature (17)..(18): n = any nucleotide
  misc_feature (231)..(231): n = any nucleotide
  misc_feature (233)..(233): n = any nucleotide
  misc_feature (240)..(240): n = any nucleotide
  misc_feature (513)..(513): n = any nucleotide
  misc_feature (546)..(546): n = any nucleotide
  misc_feature (576)..(576): n = any nucleotide
  misc_feature (590)..(590): n = any nucleotide
ggaaccaataaattgcnntctgcttatttattttacatccatagttcgaatggagaaagaaaaagtgaaatcagctaaaatatttctctaacaaggctttagaaatggctatagagttgcctgcagcttcggtagcataaacttccgtgcctgcttgccaattattagaatatgatatccaatccattctccatttctccaaagcgaagtccgtattttgttgcaggcttngngataganaactgaaataagttgaagccctgggtaggtaatagctcctgagcaggccactccaaaatttgttggcatagtcatgaagtctgctctggttggtcttcgtgttgtcataccacattgttacttgtgttcttgcattccattgatactgccttctctcgctatcacttactgctaggctttttgcactttctaaccatgtcccaagcaaaaagttgttattagaagcaaaaagctcgtcaatgtcctcgataagatccagaaatttttggctgngaaaatttaatgcttttgcatccttctcttggnatgcagtcatcacatctaaataaacctganttcctagttttganaacac

SEQ ID NO: 5011 - DNA, 594 bp, Musa acuminata
  misc_feature (219)..(219): n = any nucleotide
  misc_feature (224)..(224): n = any nucleotide
  misc_feature (521)..(521): n = any nucleotide
agtagagagaaaattattgtacatgaccgaggaaagttgaaatcttaaaacactacaagctcagtccctctgtcagatgctgaagaaaaaaacaaataactggagaaccaacatatttgaggtgattaatagctcagaaatgtgacgtctacaatatgtcaatgaaaataaccaagaacctgaccgccaacattctgcctgatagcttcctcatgatcnaaganaccattaggtgttgtgattacaacatatccccactggcgtgtcggaagcatgcgcaatctgtagtcttctatgtttctagacttgaggtcctgtctgtatgtaagggctttgcaatcatttatccttccttgcagttccacagtgatccttcccactctatgtggatcaaaaacctgaaagtctttaatatatcctcgatctttcatgatcctcaggaaggagacgatgacggaggaaatgggctggagggtggcggtggccttccccctcctctccgcgttcactatcgtgcggangcatcgttcagaatccttcggcccatctctccctatctccaccaccaacgtaacaagcacaggcggagaacag

SEQ ID NO: 5012 - DNA, 592 bp, Musa acuminata
  misc_feature (364)..(364): n = any nucleotide
  misc_feature (500)..(500): n = any nucleotide
  misc_feature (505)..(505): n = any nucleotide
  misc_feature (557)..(557): n = any nucleotide
attaattcattgaagaacatagatgacgaatagcgataagatacatagattcttgtgcttgttacaagtgccgaggaacgggaattctggtacggttgcggtggtgaagaaggtcgggagtggtctcgtagccggcgaatacttcttcccagatctcggcgaatgctcgaagaattgtgtcatggtggcgtggtgagttgagagcaaggaagcggtggagcagctcccgtagctcctcgccatcgacgatctccttatcgatgatcatctgaagcattgatctccggaactctcccagtgggtccttcgtctccttcaccaccgccacgctctcctccactttccgccctcctccttcactgcngcttcgctgatgcaatctcttcttcaccccttcttttatatgagcgggggatgggagagtgcaccgtccccacgaagtcacgtcctgctccagctcgttcagctggcgcaggagaccgaagaggtgggcgattaancggantctccatcttcacctctcctccccgtaggagaaggtggagggggaagacaangtcatggtgtcgcggacgacagtccctggcctccg

SEQ ID NO: 5013 - DNA, 591 bp, Musa acuminata
gtgttgtcacatgagcaaagaccacaaagacattctcagaaccaaattaaacagccagtaacaacacaacatggactaacttttggacaagccaaacaaagttcaaacaattaccatcataggcttcgacaagcttgcattgctcagatctgcttgtagctttatcttgattgcaccttgatgtcctaaaattagtttgtctgggctgctccatagttgcggatgcttggaggatgtaaaaacaacttgctaaccaccagatacatagaagagtatattacgcttgatttgctcagcacataggtagagtatcagcacggcgaaaccaagtcactcttcgacaacattcaccagttcatattccaccagagataggttattatcctctttcacagtgaaatctgctggatcggtcacttcaacacggccccatttgtccacagcaagtctcatggatcccttgaacatatcaatctttgcattccggagaattaatgtggtccctggcgtcatcatgtccacctgcttcattcctagcagtgacgagaatcatgccagttttcatcaccaaccaaggcattctgcaatacg

SEQ ID NO: 5014 - DNA, 590 bp, Musa acuminata
aaactgtaaatatgctacacggccgttttcagacttggggggctcatatgtataaattccttgaacctcttcttcctttacaccctcaagatggtgtaccagcaacctcccctgggggcggtgatggagaggtcttgatcttggaatcaggctcaggaatatatggctgagatgccacatgattaagggcaacaaccacatcggccatgatgggtcgaaaatggggctgctcttgaagacacatcgagccaatgacaaccaattggtgaaaggcccgtggtgggaagcagccttgaagaaatggatcagccaacaggttgaacttccttctgtcactgagaaaaggtcttgaccaatttgttagatattgctcgcctccaatccttgaagaatcaaaagccctttgcccggtgatcagctccaacagaagcacaccaaaactatatacatcagacttcattgtcaacttgccactcaatgcatagtcaggagcacaatagcctatgttcccatcacccttgtcgagacatgtgtgttgtcgccatcaggcccaagttttgcgagtccaaaatcagaagtttggattgaag

SEQ ID NO: 5015 - DNA, 590 bp, Musa acuminata
  misc_feature (3)..(3): n = any nucleotide
  misc_feature (417)..(417): n = any nucleotide
  misc_feature (582)..(582): n = any nucleotide
tanatgatgacaatgactaaagatcaacttaaccattacatgatgctactcgtgaaactttgcgaggaagcttgacaagtaaattattggaatcattctcttaacgaaatcactaactggagtcgacaagggagggaagagaagtcatttacatggtcaacatcgatgtatggttcgcacttgagcacatggctttttggtcagctatctcgaatcaaattagtaggctcgctcaaaacatacttcggtagttcatattttgcacctctttcatcatagcagagagtcatgtcagcatttgaaataattatgcctgcactgtccactatagcttgtgcaaggtttatatcagcttccgctgcagctcggagtgcatcccatatctcttctcctttggtgggagtggatccagcgcanccatcctgatgcgaaccaaaatccagtcgattgcgatcggggagagagagggtagaaatcagaccatcgggaccctgagtcgtaatgggaaaggaggagcgtagatcgtggtggtcggcgcctcgggctccgtcgaggatctcgagatgggaaggggaaggggcngtggcgaa

SEQ ID NO: 5016 - DNA, 589 bp, Musa acuminata
  misc_feature (2)..(2): n = any nucleotide
  misc_feature (12)..(12): n = any nucleotide
  misc_feature (27)..(27): n = any nucleotide
  misc_feature (232)..(232): n = any nucleotide
  misc_feature (278)..(278): n = any nucleotide
gnagaagtccanagtgaattaaaaccngaacccagtgacacactcctgaccccaggacaacacggaacacagccaagaaaacgacacagaaacttaaagcagcagtggcagcagtagtcgacaaacacaaggcttgcgaacattgctcgcttagtattcatccccttcatcgccttcatcaccctcagcagactctgcgccaacctcctcatagtccttttccagtgcagcnagatcctcacgagcctcggaaaattccccttcctccatgccctcgncaacataccagtgcacgaaggccctcttggcatacatgaggtcgaacttgtgatcgatacgtgagaagacttcagcgacgctggtggagttggatatcatgcacacagccctctgtaccttggccagatcgcccccgggaagaacactgggtggctgatagttgatgccgcacttgaatccagtcggacaccaatcgacaaactggatggtccgcttggtcttgatggtagcaacagcggcattgacatccttgggcacacatctccacggtacataaggcagcaagccatgtatttcccatggcggggat

SEQ ID NO: 5017 - DNA, 587 bp, Musa acuminata
  misc_feature (3)..(3): n = any nucleotide
  misc_feature (15)..(15): n = any nucleotide
cgntgtatcgataanttttattgaacatactgagtttaagctacagggtcgagcattaaagatgaaataattggctgatgtaaaacaacagggcacattacatcattgttaagatgtataaagcctttgaagttggaaaagcatacggtttattagatggacaaaaatgcaacatgatgagcagaatttatctcactcgaatattctccaagaaatgcgatggaagttccttagaatagccttcagagagcctaaaatataacacaaaacttattccttcaccatcggtttcactctgaaatatggtagcaggatagagtggaatctgaatgttaaccacaagaataggtgggaacttgccagatggattgaagatgggaagttccacaaatcgagcaatgtgattaattttctgctgagacaggtagacatcaacaccaaaaggacagtatgctgcataatttggagcaaactctttcttcttatccctaagggtaatgttctccccgcactctgaatgtattgggttcaatgaacgaccagctatcaagcatttctttccagcaagcagaattggacttgagatc

SEQ ID NO: 5018 - DNA, 586 bp, Musa acuminata
  misc_feature (290)..(290): n = any nucleotide
  misc_feature (479)..(479): n = any nucleotide
aatcatcaatccttttactgttcggcggggagaaatgacttgacgaaattgtttacagaatggaattttattgatcaacaccacctttcttttttggagttacagattacagtgtttggttatctaaatctgacaaaggcaactggcttccaaagagaagtggttaaccacccttctcctggttcatggttttgcaagcagctgtttgacgaatgaaagaactccaggaacatcaactgtccatgcaactgatacaggtgaataacctgtccacggattgcttgtgttcnacctgcaagaaatgttgcttcagagagaaaagcattcgactacaagaaagttgactgaagaagaaggctggtgtggcctacctttttaatccttggtccattaatgtatgccccacacagattccctgtgtctcaaccctcacaaccccctttttaaatgtaaaaagatctggtcgaactagtgcgacnaagctgacaggtcatgtaggaaataccataaacaccatcagacttaacatgcagtctctgtagaacttgcacatgtcagataaaatttgtgagtgccttcctgagag

SEQ ID NO: 5019 - DNA, 586 bp, Musa acuminata
  misc_feature (5)..(6): n = any nucleotide
  misc_feature (33)..(33): n = any nucleotide
aaacnnaacaacgacgaccgtagtacatgagantctgctgggacacagcagacgatgcaaagagaaggatgagccaaaagaaggaattcgaaggaacagagtagttagtagccggggggcttgaaggcgatgaaactgatacactgcacttggcggttgttgtcgaagccgatgatgcggatgaaggccttggggtactccttcttgcactcctccacctccttcaccacctgcaccgcgtcggtgcacccgaacatgggcagcttccacatcgtccagtaccgcccgtcgtagtaccccggcgaccggtggttctcacgccccacgaacccctcatggctgaattctaagcagggaatccatttggaacggagaaggtactcgatctgcttcaccaacggctcgtccaccagtgtaggaaggtaggagagggtctcgaacttcttcttgccctcgatcggccacaccttcatgcactggactctgccaccgttgccgggaaggtgggagaggtcggcgttggcttcctggtgaccgggaaggccgaggtggacttgagaccggtgaagggcgcaccatgcttgga

SEQ ID NO: 5020 - DNA, 581 bp, Musa acuminata
  misc_feature (2)..(2): n = any nucleotide
  misc_feature (23)..(23): n = any nucleotide
  misc_feature (537)..(537): n = any nucleotide
  misc_feature (572)..(572): n = any nucleotide
tntcatacacgcagcaatttggnacaaagaaaaggcagcatgaacgaacagttggctgcgtgttgagcactgcaagtgttcgacaaaattgcgagcacttgcggtgtcttcattcgttgtttatgacgccccaaagattcctttgttctttgtgatcactcaacaggaggaaaacacagagcgagaacgacgaagtgatgggggaaggcattggcttcagttgtggcggtcggcgacgtatgagcgagaacgtcgcagcggcaacgcccggacgcaatcgaacccatgtaattctgtctccgcgttccgtaccagcgtccgcgccagctgctgcgccttctccacgccgatgagcttggggtacgtcgtcttgccgctcgccacgtccttcccggccgtcttccccagctcctccgacgtcttcgtcacgtccaggatgtcgtccaccacctggaacagcaggcccacgcagcgtgcgtaccggcggacgcggtccacctcggcgtcgctgccgccgcccacgatcgccccgcacgncgccggcgcctccagcagcctccccgtttgtgcangtggatgaa

SEQ ID NO: 5021 - DNA, 580 bp, Musa acuminata
  misc_feature (265)..(265): n = any nucleotide
  misc_feature (333)..(333): n = any nucleotide
  misc_feature (377)..(377): n = any nucleotide
  misc_feature (455)..(455): n = any nucleotide
  misc_feature (461)..(461): n = any nucleotide
attattgcattgttttggaattttagttgcatctaaaagatgccactatgtaggtgttaaaagtatataaattacattctgtatcagggggctgccatttaccgcgtgtttgggcccaataaatggttatcctattcgatatcttttacagcatcctttgcaagacgagtaacataagctgcggcaagggctgtaaataacagccctatgccaagagtcagtaattgaccatttccccctaacaaccccacatctgactcctctngaattatggctcgcccaaatgcaccagcactaacataagcccaagtccctggaagcattcccaaccancttcccagcacataaggaacaaatttcaccgatgtcaagccatntaaatagttccctagagaaaatgggagtaaaggactcaaacgaggagtgtaacaactctaacaccattttctccaatngcctantcaattgccaaaaacttcttatttccttcgaccatttaagatgcgctcccgtgcaaatacctagcataagaaaggctacagcagcagcaaccgtccactgttgagacatgatggtgcag

SEQ ID NO: 5022 - DNA, 580 bp, Musa acuminata
  misc_feature (5)..(5): n = any nucleotide
  misc_feature (27)..(27): n = any nucleotide
  misc_feature (167)..(167): n = any nucleotide
  misc_feature (511)..(511): n = any nucleotide
  misc_feature (521)..(521): n = any nucleotide
aactnttacaatccaactgtacatganctgtggcaaattacaccacctattttaaggctataaatcaagcaactggaagcaagaaacgggactaaaccctaatttctagtgtattaattgctaagcagatctgatggtggtgaatgtgaagctggtttctgttgatnctctctggttaccttgacaggtgagtccacagaggccgcaataggtggcggtggttgtgcagtaacattgccacttgaagagtcttccccttgcttcaatgacggaattggtagctccgtgagcatctgcaccacttccctcatcgtcggccgccccacgctctgctcctccacgcagagcatcgcgacgtagaacacatgcatcacctcgtggatgggcgcagtcggaagccttgggtccaagatcttggccacattctctttgtcggagcccgtcatcttccttacccattgcacgatgtcgacgccatcaccgaattcaccgaccggcttctaccggtcancagctcaggngcaccacgccaaagctgtacacatggtcttctcgtcacttgagggtgtaagcatactct

SEQ ID NO: 5023 - DNA, 577 bp, Musa acuminata
  misc_feature (3)..(6): n = any nucleotide
  misc_feature (24)..(24): n = any nucleotide
  misc_feature (182)..(182): n = any nucleotide
  misc_feature (218)..(218): n = any nucleotide
acnnnnacatgaatacattatggnaggaaggtcactacaaagttcacccatgtttgacactaaaagccccataaataagcaacatttgactgaataatatgaaatttgtctgagttcatcatcaaacgaaaaacctatctggttgaatccaatagagtcagttcctaaaacataaaaaggcntcaaactattattattggcagtatgtttgacaagcnactcatttcttcttggcagcagcctttgtaattttagcaccggttggatccttcttctcaacactcttgatgacacccacggccactgtttgcctcatatccctcacggcgaaacgaccaaggggtggatactgggaaaaggtctcgacaaccatgggcttggtaggaatcatcttgacaaaaccggcatcgcgttcttcaagaactttggctccttctcgagctccttcccagaccgcctgtcaatcttggtaagaatctcggcaaacttgacagcaatgtgagaggtgtggcaatcaagcacaggtgcataaccattgccgatctgaccaggatggttcatgatgataacctgagaa

SEQ ID NO: 5024 - DNA, 575 bp, Musa acuminata
  misc_feature (2)..(2): n = any nucleotide
  misc_feature (4)..(4): n = any nucleotide
  misc_feature (6)..(6): n = any nucleotide
  misc_feature (25)..(25): n = any nucleotide
  misc_feature (30)..(30): n = any nucleotide
  misc_feature (434)..(434): n = any nucleotide
  misc_feature (532)..(532): n = any nucleotide
  misc_feature (534)..(534): n = any nucleotide
anangnccacatcatttcatgattnttacntaaacctcttaaatcagtaagatacagggattacaagtactggtgaacaacaaaaaagctacactattaagcaaataaattcaatgtaaagctggaactcgagcaccacagcttacagaacaagtgaagcaatcatcgcaaatgggagaagagaggtacaaagtttattaccagcctcaagcacggcgcttactcagacgccaagagttgggttcgtgatatcggtcataaagtggttcgatacgctcttgtcgcttgcgtttactcatttttgtaggatctgcacccttgtagaatcttggagccaactctactaaccacttggggtcaactactgtgacttccctcatgtactccttagtcgtcattacaagctcgtgatatataacccagtctggttgccnttgaaatagagcactgctggggtgaatatacacaggctggttctcaactaaggtcctgtacccttcctggggatctttccttgctgcatggaaaaagnanccccgccgtaattgccttccttatcttagtaaaattttttc

SEQ ID NO: 5025 - DNA, 572 bp, Musa acuminata
  misc_feature (6)..(6): n = any nucleotide
  misc_feature (8)..(8): n = any nucleotide
  misc_feature (19)..(19): n = any nucleotide
  misc_feature (27)..(27): n = any nucleotide
  misc_feature (34)..(34): n = any nucleotide
  misc_feature (42)..(42): n = any nucleotide
  misc_feature (44)..(44): n = any nucleotide
  misc_feature (71)..(71): n = any nucleotide
  misc_feature (91)..(91): n = any nucleotide
  misc_feature (101)..(101): n = any nucleotide
  misc_feature (121)..(121): n = any nucleotide
  misc_feature (134)..(134): n = any nucleotide
  misc_feature (142)..(142): n = any nucleotide
  misc_feature (148)..(148): n = any nucleotide
  misc_feature (154)..(154): n = any nucleotide
  misc_feature (162)..(163): n = any nucleotide
  misc_feature (171)..(171): n = any nucleotide
  misc_feature (227)..(229): n = any nucleotide
gtgatngntcttgaaatcnccatggangatttanggtacacntntgccaccaagattatgaacaaagacanacttttgaacactataatanaaccattacnaccatttgcaagtagcatgnggagctttcttanaaatatanagtggnatccgnacggcctnnaaggctcnacccacaagattacagaagataaagaacctcgcagctcctcatgtgaggaccaggnnntttacgctggtggtcatttgtgtgaggaagacttgcatgcaacaactcaaccggcatctccctgctaatagctctggttgcctcagatcccacaactgcagtgcttggtgcctgcatgagtaacatttgcattatactgtcatatttactaagacagtacttagtaagaagcccaaagaaagcatcgaacgatgcctgccataaagttcgactagagacagtataattgtttgcagcatgagggtctgtcagaagatctgttgctcgatccagaacagactttataattatgctagctccatcaccagctgaacttccagagggcgagaggtggtgtcgatga

SEQ ID NO: 5026 - DNA, 570 bp, Musa acuminata
  misc_feature (547)..(547): n = any nucleotide
ttagaacttcgtagcgaaaatggcagacttcgggctgtccaaagacggtccggcattcgatcatacgcacgtcagtactgccgtgaagggaagcttcgggtacctcgatccagagtacttccggcggcagcagttgacgcagaaatcagacgtctactccttcggtgtggtgctattcgaagtcctctgtgccagaccagtcataaatccaagcttgccaagggagcagatcaatctggcggagtgggcactgcattggcagcggcagaaatcgctggaaagaatcatggatcctcgcctgggaagggaactactcatcagagtcactgaagaagtttgcggatatcgccgagaaatgccttgctgatgaggggaagaaccggccgacgatgggggaggtcttgtggcacctcgagaatgtgttgcagctgcaggaagctcatgtgcagaagggagatctgaattcatcgacgacaagccaggcgagatatgctgcagatgtatcgttcagcctcccgcgcattgtcgagggagaagaggaagcttncacagaaccagaaagcattgatg

SEQ ID NO: 5027 - DNA, 569 bp, Musa acuminata
  misc_feature (5)..(5): n = any nucleotide
  misc_feature (7)..(7): n = any nucleotide
  misc_feature (523)..(523): n = any nucleotide
tcttntntggagaaatacaacgaggcgagtatcttgtactgcctgccactcgactcgagtatcgacctaaaaaaaatgtatggaactacttccccaacacaacaacaatcacacacggctaaatggtgtcaaaccaaaggctgtcatggcatcaaaaccagcctgtgttcaatgatattattccaaaacaattaaattcgacttataccattcccaattaagtggatttctataagcccactgcttgctgagcccttctgaatttgattcaagaatatccacgtcatcatgacgtgtggagcaattcggacacagtagacgggaaatccggtgtagaatttgaaaggcccgccagactttaaggtcttcatcacacagtccaaagaaccagtgtaaggatacttcccagtggcatcaggctgcatcttctgtatttgtgtcttcacataatcaaatggtaaactgcagcagatgcaaagaaccctgaaacagcacttgccccaattacagtgctaacttcacnaaaaccaagagatccctgaatagctcatgctctgatcatatgtgca

SEQ ID NO: 5028 - DNA, 569 bp, Musa acuminata
  misc_feature (138)..(167): n = any nucleotide
tttattactacttaaggatccgaataggatgttttttatgcactatcagctcaagcatacattccacaatgaataaatacaccgtaatcccatcgaacaccacaacagaagaaaagaacgaacagcgccacgacggtnnnnnnnnnnnnnnnnnnnnnnnnnnnnnngtgatgtaggcattcgggcgaacgtgttcagatcacgccctgggcttgcagacgatggtggagtgcttgagtatgtggaggctgaactgaccgcccttctcggtggtgtcgaccttgctggcgcccggcggcggcagcagctcgaagtcctggacgaggcggccgagggtgatgccgaggatgggcagggcgaggatgatgccgggacagctgcggcggccgacgccgaagggcaggtaacggaagtcgttgccgttggcctccaccttggcttcctcctccaggaagcgctcggggcggaactcctcggggttgctccagtgggcggggttgttggcgagccaccaggcgttgacgaggatcttgctctcggcggggatgtcgtaacccgccgagttggcg

SEQ ID NO: 5029 - DNA, 567 bp, Musa acuminata
catgtatagctcattaggatgtacaggtgctatgactagcatatgaacaaaaaagacagtcaaaaattgacctcaactcgaactttcaaatgaaacctgatagtgtgtgaacttttgattctgagttgagacagcagtgatacctcgtaataaccttagaacttcactggtatcttcaacgtagtatttggccttgcttggcttttgaccaactgtacatgcaaagacttcgggaactgatggaaatagattgcttgaagcagtgttgttgatgctctcaaacatgtcctcatcagatcggtcatcaccaatgcacatcacaaagtccggtggcttcccacggttgctcagagtcccaagaagcttctccaccaccagccctttactaactccctgaggttttacttcaacaatatgttgaccccgcttaacaaccactggctcgtttgccagaacactctcaagatgatccagtagtctttagcttggcagggaccaaagtcatgatctgcatattgatgatgccatacaattgcactctcctttacttctacaatgaccatctgt

SEQ ID NO: 5030 - DNA, 565 bp, Musa acuminata
  misc_feature (554)..(554): n = any nucleotide
ggttgcagtgttttcttccttggtgagccattcctgagcagcaacaagatcaggaagcacaatggcaccggactttctccaggtctcagcatccgatgtcttaaatctatccaagagcaaagcatgcataccgacactcctggctggaaggtagtctttgcgcatactgtccccgatgtgcagtgcttccgatgggttgatatttccggccttctccagtgcaatctgatagatccttgggtctggtttttcaacacccactatgcctgagaatacaccaaagtcccattctaaacccctattgagtcctaaggcaggaagaatgacatcttgatatcgatactctgcgttgctgacaattccaacaatcagacctttctggcgtgcccatctgaggaagggttgagagtcaagaaacacagagtagggtgccgaagatccaaatgatgagtatatgcgttgaaaaccttctcaaatgtctcatcatcatattcatagctgcctgatgaaggatcttcacacatgatctccacagtcatgttggattttgctgntgtcaaaacat

SEQ ID NO: 5031 - DNA, 564 bp, Musa acuminata
  misc_feature (266)..(266): n = any nucleotide
  misc_feature (528)..(528): n = any nucleotide
  misc_feature (540)..(540): n = any nucleotide
atcttggaaatattgttccttacaggcaaaagggagttctttgaaagtttgtttacgagtgatagccataaagatgactctgatctccttagtcctgaatgactatggttcatcccactagttccataagaactgtgagtgatctgatgtcccgagtgcttctgaattttccctcgactagaactatccatgttgtctagattggcttccagcttgagcgaatgaaactccaacttttgttccagaatgtcccaatcccagcaatngatttttttctcttataaacatctttaactgctctgaatccctgaggcaaaaaagtatcactctcacagactttgtacaactctccagagtagaacaagcagtgctcaagaggaacgggtctttttgttgtccctgtaacacggatcttcttttgttttgttcgaccaatccaatcagcaaattcaattgtgtttgggaccgttgctgaaaggaggtaatattgacatgtcttggaagcatgatgataacttcctcccacanaacacctctttnagcatattgacataatgcacctcg

SEQ ID NO: 5032 - DNA, 564 bp, Musa acuminata
  misc_feature (11)..(11): n = any nucleotide
  misc_feature (15)..(15): n = any nucleotide
  misc_feature (18)..(18): n = any nucleotide
  misc_feature (45)..(45): n = any nucleotide
  misc_feature (47)..(47): n = any nucleotide
  misc_feature (89)..(89): n = any nucleotide
  misc_feature (127)..(127): n = any nucleotide
  misc_feature (132)..(132): n = any nucleotide
  misc_feature (135)..(135): n = any nucleotide
  misc_feature (141)..(141): n = any nucleotide
  misc_feature (207)..(207): n = any nucleotide
  misc_feature (256)..(256): n = any nucleotide
  misc_feature (287)..(287): n = any nucleotide
  misc_feature (307)..(307): n = any nucleotide
  misc_feature (371)..(371): n = any nucleotide
  misc_feature (496)..(496): n = any nucleotide
aaaaaaaaaanaacnccnaaaatgatcagtcgtataatcattacncnactgatgttttctttccaaaacttcaatgcattatttctagncaataattgaaagattgagaggcaaatgctatagtgtncattncanctgctntctttcttctgagttgaatctgttccaagcttccttaaggagatcgaaaactttctcacaaatgtncttctgttgaatgctggcccccctttgctgtaacttatctggatgaacncagagagtagccctcctgtaagctttctttnctgcagaagatgtgataacntctgtcagttgtataggctgccaaccactctcagggccaaggatatattgcagtgttgatagcngtgcacgcaaatttccttcttttccattcgaccatctcttaatgtcaccatccaggtactctgccaacctatttttctcagcttgctctctttgtgcaagaacatcccgcatgtttttttctgcnagagctttggcagcacgttcagctattctctgatgcctctctaagtctagcttttacaccttaaaagc

SEQ ID NO: 5033 - DNA, 564 bp, Musa acuminata
  misc_feature (7)..(7): n = any nucleotide
gctttanaaaactcatgtcatgttaactaggaggacatgaaatactttgttttaccaactctcgagtttcaaccctaaaacccagaatacaacctactacaatatttttaatcccaaatgccagcttcaaattcaacaaacaaaaacattaattagatatttcgatgactgatctgggtatctagtcttgctgaaaattctatacccaaaacttaagttaccaaatctatctcagggagcggcatctacttgttgtagaggtaaacaatgctgaaaatgaaaaatgccaccatagttgaaaatgatgctccataatataaaaaagcagtcgttatgaatctctcatattcattgtgccggaatggtcggacaggtatctgttttgaaagtgataagctagtgtatccaagtttttggtgctccaccttaaactggaaaacgccatagacatcaggaaccttgaatgaagttgaatacaggcccttgtggtcagtggcaagggtttttagtacataggggctcatcatataaaattggaacttgcacatcatctgctacatatgg

SEQ ID NO: 5034 - DNA, 562 bp, Musa acuminata
  misc_feature (14)..(15): n = any nucleotide
  misc_feature (17)..(17): n = any nucleotide
  misc_feature (26)..(26): n = any nucleotide
  misc_feature (34)..(34): n = any nucleotide
  misc_feature (38)..(38): n = any nucleotide
  misc_feature (120)..(120): n = any nucleotide
  misc_feature (349)..(349): n = any nucleotide
  misc_feature (431)..(431): n = any nucleotide
  misc_feature (449)..(449): n = any nucleotide
  misc_feature (461)..(461): n = any nucleotide
tctgaagtcatganntngaagcggangatatggntatntctgctcagggtcctgagaaggggcacagtaaaacgagagaactggatagtgaagatctgttggagcagttgcctgcattgnagcagttattatatcggcttattggatgccgtccagaaggagctgctgttagcaattatgttgttcagtatgccctagctttggtactgaaagagagcttcaaaatttattgtgctattaatgatggtatcattaatcttgtcgataagttcttcgatatgccaaggcatgaagcaattaaggcccttgaaatctacagaagagctggccaacaggcaacaagtctttntgaattttatgaagtttgtcgtggattggaacttgctagaaatttccagtttccaaacttgagagagcctccacaatctttnctcgccactatggaagantattcagagaantccacgagtggttctgtctccagagagccattggaattcccagaaagactccttctgacatacaagtagaggcagtccgactactgttgaggaagaaaaac

SEQ ID NO: 5035 - DNA, 559 bp, Musa acuminata
  misc_feature (4)..(5): n = any nucleotide
  misc_feature (53)..(97): n = any nucleotide
  misc_feature (224)..(224): n = any nucleotide
  misc_feature (340)..(340): n = any nucleotide
  misc_feature (418)..(418): n = any nucleotide
  misc_feature (454)..(454): n = any nucleotide
  misc_feature (470)..(470): n = any nucleotide
  misc_feature (484)..(485): n = any nucleotide
  misc_feature (489)..(489): n = any nucleotide
  misc_feature (544)..(544): n = any nucleotide
  misc_feature (548)..(548): n = any nucleotide
caanntctgccttctactgttctgacccctgtgaatcattctccgatcgagcnnnnnnnnnnnnnnnnnnnnnnnnnnnnnnnnnnnnnnnnnnnnncccacttccaccaccacctactcctcccctcccctgccccatctgttgatagaactggcttaatccctgaggattcatagctccaatatggccctccggcgagagccctagctccagccccggcaantgctgcccatgcccgcccaacatcgccgcaaagctcacggcgcccagattcccgccgggaaattcaagtccatgcaatccaatcctcggcatgaaaccgcccatcgaccagtcgcngccgcccccggtcgcaagattcgaacttgatggagccgcggcgccggcatgcaagaaaccagaattgagcccacccancgggggcgggcataagccagggtgggagcggctgangttagaagtcaccatnacggccaagtaggnngagnggcccctgtcccgaatgtcgagttctggggaggccggcacgacatgcgccagggngggnatgaggcggaa

SEQ ID NO: 5036 - DNA, 552 bp, Musa acuminata
  misc_feature (12)..(12): n = any nucleotide
aatctcatccanttggacccagaataccgaagcccataacgagagggtgcgggggaagaaaattctttttaccacgaatcatgaaactgcctactgtgagatactctcctgtgggagctgtcttactaacttgatgtggatatacccaccaggcacttgtaacaatttttgactcccatgcttggctgtgacagacagtaaaacatcctgcttgatttaacgtcagaggtggtactaaattatctggcttgtgattcttgatcacagtactagaagctccatgcaggtccgcatgcacatacagatctcccttggacatatatcgcttaactatcatctcattttgttgtgcatcacgaccacttatgatcaaataattttcgctgctgataaaccagttgaatttctcaaaccaatgcactttccgcatatgagaaattgcagcaacagtcttctcctgagcaagttgatgtcgagttttcttctcagcagctttgaaagccttctcatgcgctttaaatgggtttgtcctgcttgttttcctgtcttttc

SEQ ID NO: 5037 - DNA, 551 bp, Musa acuminata
  misc_feature (7)..(7): n = any nucleotide
  misc_feature (11)..(12): n = any nucleotide
  misc_feature (24)..(24): n = any nucleotide
  misc_feature (53)..(53): n = any nucleotide
  misc_feature (67)..(67): n = any nucleotide
  misc_feature (97)..(97): n = any nucleotide
  misc_feature (500)..(500): n = any nucleotide
  misc_feature (526)..(526): n = any nucleotide
gacatcncagnncatacataattnacttactcaccatctggcacctgctcgtnttgctgtgcatgangtggctgccacaagtaaaccaccgaatgangctgctcgacagcatacacagtccccgcagccgcttgatctcctggcttccccatcaccattccagggcctggcacttgcgccgctggcacatagtaatacggaattgcgtcaccgggagcacccacagcagctcgtgtaatccccaggccctcatcctttaactcatccctgggaactatatccaccaggaagtcaaatatgtcggttctggttatagcgccacctatgtcattcttctgcagagttctcctcttattctcttcagtatggatccatgatctgagtgtcagttccagtataaacagttcgcacgccttggcaaagaccacaggggcctcggctgagatcatacggacatcctcatcggccttcatgatcttttttatccgggcgagcggtangctgtgattcttgaagtctgtgattngttctatctccagcatctggttggc

SEQ ID NO: 5038 - DNA, 550 bp, Musa acuminata
  misc_feature (471)..(471): n = any nucleotide
  misc_feature (517)..(517): n = any nucleotide
agcttttggaatgtgatcaacatactgtggcttgatgattgcctttagattgtcctccagtatacgagtaaaataattctgaagctcagagccacggaaatatgtcaagatctcctgccaatcaggaggattattgaatcgacccaagttgggctttaacttcccggccaacactttaagcgcagtggactttccaataccatttgtaccaaccaggcccagaacttgtccgggtcttggaactggcaatctgtgcaatttaaatgtatttggtccataacggtgagttgtatctttgtccaagtccttcggtagattgatgatctgaatggcctcaaatggacatttcttgacacatataccacatccaatgcataactcctcagaaatgaaagcaagttttgaggcaggggttacttctatgcaaagctttcctgttttcacgacggggcagctcttcttgcactcttngcggcacttcttcggcttgcatcggtcggagctaacgtagcgtacnggtcagccgatccgccatgttggagaggacgag

SEQ ID NO: 5039 - DNA, 550 bp, Musa acuminata
  misc_feature (87)..(107): n = any nucleotide
  misc_feature (523)..(523): n = any nucleotide
  misc_feature (542)..(542): n = any nucleotide
ttttaagttccaaacttgatatgttgaggatgacttgacaacaaaaacaaccactaaaacatgcaattatgtggtgtcattatgttnnnnnnnnnnnnnnnnnnnnnacttctactattccaaacacaagtgccacaatcaatagaacaaagaagaagaaagcacaacaagaatctgtaattccataatcatcaactaacctctagggcatcttctttatcatccttttcaccagttggcaacttaggaacttctgcattgttatcatatttggcatcaaccgaagcatatgaaatgcccctgcctgaactggaacctgaatcaggctctcctgattgctgagatgtattcaaagcatgacaatgaggacagtagtaagatatgcgaggataatcttctttccttgccagtccattatgcatatggcagttgccacatatgagcgcatagctctgcgatggtcctcacccacaagcaaatgcagctatacgagcatccaaccacccatcactagcaccagagnctttgtagtgttcaacaancttctgag

SEQ ID NO: 5040 - DNA, 549 bp, Musa acuminata
  misc_feature (8)..(8): n = any nucleotide
  misc_feature (28)..(28): n = any nucleotide
  misc_feature (219)..(219): n = any nucleotide
  misc_feature (233)..(233): n = any nucleotide
  misc_feature (482)..(482): n = any nucleotide
attaccanatagccttatgccaatttangtttgcagacagataacatggagctttcatatgttaatataaacgtagatagagaagtttacttggtgagggattcacatgttggcattgggctttcttatgctgcacttgttctcttctcgctgcatactctctcaggaatctttcttcgagaaaatgatccagatccaagcaaatatttggaaaattcnccaggatgaaaacnttgacaaactttgacatcgaagatgttctccactcaagtcagataggcaagacacacaatatacatgtccacaattaagaactgcaggctgatacaacatttccttgcacaaagaacaagatacatcatccacagatatattcctttttatggtatgatcaaggcaattttctgacagatctgagcgttcaaaatctccacttctgcaatcattaaattttttgctagaactcccattaccaaaatganaacctccaactctaactgatctgcaaactgaggtgagtacactcagcagccttttcttccactagat

SEQ ID NO: 5041 - DNA, 549 bp, Musa acuminata
  misc_feature (12)..(13): n = any nucleotide
  misc_feature (23)..(23): n = any nucleotide
  misc_feature (416)..(416): n = any nucleotide
  misc_feature (547)..(547): n = any nucleotide
ctgcagttttcnngtcccatgantctttctcctttacaaatgatacaagctcaacctcataaataacagtggagttggcaggaaccacagcaaggtcctgctttgattcagtggacaagaaggcatattcaggtggaattgtcaccaaagcaatctctcccttattcatcgtcatcactgcttggtcaagaccttcgataactttttcttcagcagtcttgaactcaaatgattcctgctcatcatgacccttcttcacaaaaattgtcccatcttgtagtttcccaatcagtttcactgtcacaactgctccttcatttgggtgatcataaccttctccttccttgaggatcattttaatgatcttcttgtcatcccctatctgtgtaacagtcttccaagagactaactcaagntccacataaagatttgcatttggtggcacggcaccttcgtctccagaagctggtctacctttctcaccaaacgcatattgtggtttcacagtgagaagcactttttcagccctcttcatagtctttacagntt

SEQ ID NO: 5042 - DNA, 542 bp, Musa acuminata
  misc_feature (9)..(9): n = any nucleotide
  misc_feature (151)..(151): n = any nucleotide
  misc_feature (375)..(376): n = any nucleotide
actgttttnctactgaaacaatttcaaagaggtagaaatttgaagggacattacataaataaatgaaagtttcattatgagataaatctcatggagctgctagaatgtgaacaacctaagtacagacaagtcaacttgttggttgtcgggnttaatatcattcataaatggggagatcgaaaggtctctttcctagagaatcttctaagtctgttcctgatgtgggaacgcgttgcaagcacctatcactgctgtctttcttcattttcaagaataaactgtgccatcgcaggtcagtagtcagttcagggtgaaaagcagtccccagtaagttcccttgccttactgcaacaattactctctcacgagaaactnnattcctcctcctggccattgtcaacagacattatactctttttcgtttccaaaggaacagggcaatctgttaatatctcgacatcaggtcctacttctaagatggtggtgacgtataaagctccacggaaaccattaggcccccttccctcctctgcaagcttggg

SEQ ID NO: 5043 - DNA, 541 bp, Musa acuminata
  misc_feature (2)..(2): n = any nucleotide
  misc_feature (480)..(480): n = any nucleotide
  misc_feature (482)..(482): n = any nucleotide
  misc_feature (501)..(501): n = any nucleotide
  misc_feature (506)..(506): n = any nucleotide
cntaactctttaggtcatatgagcaggttaatttggatccttccatccatggtcaagaagcacatcacctgaaataggcaacgcctgcctcatcactgtgttttttgttacttggagactggtgggggttcgctggtcgccgtccgttgcctatcgaggagctccctggccaatgcctggagatcgccacctccaaacccagagctctcagaaaggttcctcgtgctggtgctgagctgctgctgaagaggccatgctggctggaccagagggtcaaacagtgccgacaggtccacggtggaaggcaggttcgcggccgatggcaggtcggatatcgagaagggcatcgatgccacgagcgacggcggagggggtggcggaggaggggacggcagctccaacgtggccagatgggcttgtaagtaggacagctctgcctgcaggttgactacctgttgttggagggcgaagatgtgagcnangcagccgtagacggggtcncgganggcgcgcctgggccttcgtagcagatggtaaccga

SEQ ID NO: 5044 - DNA, 539 bp, Musa acuminata
  misc_feature (23)..(23): n = any nucleotide
  misc_feature (48)..(48): n = any nucleotide
  misc_feature (93)..(93): n = any nucleotide
  misc_feature (154)..(154): n = any nucleotide
  misc_feature (307)..(307): n = any nucleotide
  misc_feature (384)..(384): n = any nucleotide
  misc_feature (497)..(497): n = any nucleotide
  misc_feature (506)..(506): n = any nucleotide
ttcgtggagtaggccaacgggancatcatattgctttcaatgacaggnggggacgtacgaccgtcaaatacagcaaccaaaaaccatgcaggnacaaacatgaagactaattgggtgaagacacgatgacacagtctttgatcactcatcaggncactcgaagtcggatggcacttccttgccgcagtcagcaagaacctcgagtgcaggggaaagaaggatctgtatgttcaaggcctgggccttgatggtggcgcacagacacagggcggcgtcgaggtcggagagcccctccagcaccgggcancactggtaactcacgccctcgccgatgatgatgtgcaccagccccccgagtaggtccacgcacgagtcgagcttagnggtgtcgatggggcatgtcggagtcgtcggtgatggagggtatggagtcggggttggtggcgacggcgttacgtatgctggtggtggagggtttggagctgtgtacgttggtngtggtggtngtgaagggcttggagtagtatacgttggtggcg

SEQ ID NO: 5045 - DNA, 533 bp, Musa acuminata
  misc_feature (2)..(2): n = any nucleotide
  misc_feature (305)..(305): n = any nucleotide
  misc_feature (522)..(522): n = any nucleotide
anaagtcctgtttcatcatttcacttgttcaagtacatttagataaatctcaatgtcactgtcgaacaagttcaaaatatcaaatggcgtctcataacatgtttcatgaagcaaacgttgccagtgtcacccaacatagaacaataacttcagatgaaacttggacaaacaggtccttttgatatgccaaggcgaacttccatcccgtgatgcatgtccagtggcttgaatgtttccgagtcctgtggcaagttaaggtaatcttcaaaagcaaaatcatccaagccaccagtgagagcctcaanatcctagcatggaagagggcaatgctccgggaggtctttggaatctggagagaatttgggcatcgagatctctcctcagattgaaagccgttccgtagtaaggtccaaccccatccgttcttctcctcccagattctacccgtggattcgcgaagggattgaaggggatgggtccgacaacgtcgcccttgacggcgtgcacccgaagcggagggcntcgtggttcgc

SEQ ID NO: 5046 - DNA, 530 bp, Musa acuminata
  misc_feature (2)..(2): n = any nucleotide
  misc_feature (4)..(4): n = any nucleotide
  misc_feature (6)..(7): n = any nucleotide
  misc_feature (14)..(15): n = any nucleotide
antnanncaaaatnncttgcagcttcatttacatgccctcatctctgtcctgtcttaccctaaaccttcactcttcagcgacgccactcttcgatccatcgaaccaaagtcacttgctgcagtgggcgtaaaggaagccgtcgacctccgtagcccccatcagagcactcgccagctgatctctctgcaagtgcgcctccaaaacctgctcttgcaccgctctcagctggccctgcagctcctccacgcacctctgcaggcacagaacgattccagcgcatccatacacggggtcctgcagccttgcatgagcttcgtacaccatgctctttattgcgtcctccttcatcccttccttcaccacttgaagcatcttgacgacgttgctggctccgaacaccttgtgcacgctggcgaacttgtcgggctcgtcggccggaaagtacggcgcaacaggcatccgtggtcgcacttccggtgcagcgttcgacaagcagcgcagggaagatcagctcgcccgttccataaca

SEQ ID NO: 5047 - DNA, 528 bp, Musa acuminata
  misc_feature (212)..(212): n = any nucleotide
  misc_feature (505)..(505): n = any nucleotide
agctatcacaacagagtacttgaggaggaaaggacacaaggaaagagaaaccatgacagcacccttgttcggtgttggctgctcctcctcccctctgtttcccctctccaccatcatcatctttattgctactattaatttatagtaatgatgaagattaatctgtaattaaccaacaatataataatacacggtcacgtatgatgattgcntcaggccgacgctgccgctcgctcctctccggcgatcttgcgcttcctgttgatcctcttggtggtctccacgccgtagtactcgacgtaccacttcacgaacttcttcagcccggtggcgaggtcggtggtcggccgatacccgaagtccctctccgccaagctgacgttggcgtgcgtgaagggcacgtcgccgttctgcggcaacgtgacgacgttcttcttggctttcttccgtagcaggtcctccaagatgcttaccatcttggcactggaacagggagtgttgcgangttgttatccgagttggcgggcc

SEQ ID NO: 5048 - DNA, 527 bp, Musa acuminata
  misc_feature (2)..(2): n = any nucleotide
  misc_feature (10)..(10): n = any nucleotide
tngacaaagngatataagttgtaatcatgataaataacattggatgttctgttcttccagctgacagttttccctagttatcatgtccatttccttcaaaagataaatctctcttgcagcactagatgaactaatccccctaatcctaaaacccattctggtacattatgtgacagcaaatacaacatgttgtatgagacagtggcacggcaaccatgcaacattgatcgcccatcgtgatggtcgaaatctgagggtcgacctggagccgaccctaaatcatcaggattgttcggataagcaataactctggcaattagttcactttttactcgagtttaaggacccatccttcattagtcggacactcagactgttgaatcttcctctggagtagtgccgtgaagccttcctccaatctgtcccagtcttcatcattgcgacaaattcgtcatagctgattcgcccgtccttgtcgctgtcaacttcttttaagaaatcatctgccacgtccgtgctatcaggag

SEQ ID NO: 5049 - DNA, 525 bp, Musa acuminata
taaataagaacatgactagctttgatcgaggttgaacagtgtgggagcaaaagaagacagcagcgtagtacatgacagcagcgtttctttatgtacaggcggccaacgcaaccgagaagagaaggcggggagcggcggcgcgatggaccgaatcacaagttgcgacagaggcaacaaggagcccaatcgaagagggaggcccagatgtcgccgtgccctcgcctccgcctccgcctccgccgctggatcgccctgcccgccggcgaaggacgccgtcgggtctcggagtcggccttgcgcaggatctcccacatgacgcgcacgtcctcgtactcgcacgtcctcacctccttccgtagcttcttcagcccggtcctttggtcgccgagacgggtggcgaacgattccacactcgacgcgccgggaacaccaccacccgctcccaccacgccatcctaagtcccttcccctcttctcttcctccgacgagagagaaagagaagagttgccgtccctggtttggag

SEQ ID NO: 5050 - DNA, 525 bp, Musa acuminata
  misc_feature (498)..(498): n = any nucleotide
  misc_feature (507)..(507): n = any nucleotide
aacagtatcgtggtatttgttacatgcgcatgatcacatctcagaagcgaacaccgtgctaattgatgtgctcttcgtggaacagttcgattacagagtgccgatccccggcgtggatagttgcagcgccatcgcgggactgatgggggcgaaggcggagggcggtctgcagatgaacggcctgccgatcaacatgtacgcgccggagacggtgggctgcgtggtggtggacaacaatgggtggtgcgccgccgcgacgtccaccggcgggctgatgaacaagatgaacggccgcatcggggactcgcccctgatcggctccggcacctacgcctgcgacgtctgcgccgtgtcgtgcaccggcgagggcgaggccatcatccgcagcactctggcgagggacgtggcggcgctgatggagtacaaggggccgagcctacaggaggcggtggactacgccatcaaggagagctggacaaggtaaggccgggtcatcgncgtgtcagnaatggcgaggtggcgtac

SEQ ID NO: 5051 - DNA, 522 bp, Musa acuminata
  misc_feature (8)..(8): n = any nucleotide
  misc_feature (11)..(11): n = any nucleotide
  misc_feature (461)..(461): n = any nucleotide
tactactnatntcagcactcgagtagctggaacaatcggttacttggctcctgaatatgcaattagagggcaagttacacggaagtctgatgtgtacagctttggcgtgcttctactagaaatagtcactggccggtgtaacacaaacacaagattaccatatgaggatcaatttctacttgagaggatatggtcgctatatgaacgtggtgagatgacgtacattatagacactgatttggctgatgatttagatgttgatgaagcatgcaagttcttgaaggtcgggcttttatgcacacaggacgctgcaaagctgcgcccttcaatgtccgatgttgtcaggatgctgaccggtgaaaaggatgttgacttagaggaaatcacgaagcctggtctacttggtgatttcttggaccttagaagccagaagagaactgatgacatccatgttccctccntcatatcctccggtcatgatagttcaccattgttatcagaaatactacacttgcatccatg

SEQ ID NO: 5052 - DNA, 519 bp, Musa acuminata
  misc_feature (23)..(23): n = any nucleotide
  misc_feature (312)..(312): n = any nucleotide
  misc_feature (314)..(314): n = any nucleotide
  misc_feature (453)..(453): n = any nucleotide
tatagtcaccttcaagctcatancacttcaaagaggacactgtatgccactataaaaactaagtaacttatcgtcactcttagacctgataagctctgatttcttgtttgcaccttcttaaacacaaaagctaattgctgcttaacctattggctggagatcacaaagcttggaaagagggaagggaggatgaaagatggaacctccgagtacagccccggttactagtttgtttgcagcttctgtggcatgaatcccatcccagctcacgtagttttgtggatctccacaagcagttgcagtcaccttgangncatttatcaccttgctgtttccacagaaaacctgtgggtcgaagttataagcaccacctccatgtccgcagcaagctttggttccgtagacgagtccgtggtttttgggatgtcgaaagagctcgagcttgacagagtnaggtatctacatatgtgatggtgggcatccggaagcatgtctctcatgtgttggagagtgtcattc

SEQ ID NO: 5053 - DNA, 519 bp, Musa acuminata
  misc_feature (6)..(6): n = any nucleotide
ttatcncttaaatcatgttcttgcccttgtatgacaatacagtactccaatagagtagaagttgtagatgagtcgtgtttctagtaggttttagaaaaaattactcgagtagcatttccacatcaactatgataaagcaacccagcttcgatcggaatggtgcagcatgacagtcatctgatggaaataacacagctcaatcgagaaagattatcatggatgagctgcgattgtcattcttcagcagcactagcagcacttagatccacgctgagatcaagagtctttccagtgatcatggtatacatggacagcacgtccatgacggttgactcaaaatgggttgtagcatcataactagttgagatgaagcaattatccagcgagggttcgttgacaggctcatatatgtcataagtctcaaaaaatagctcatccacaggcccaagaagatcaatcccaggctttagttccacttctggcctatcagtctcagcttctgttaagacaaaggcgata

SEQ ID NO: 5054 - DNA, 518 bp, Musa acuminata
  misc_feature (3)..(3): n = any nucleotide
  misc_feature (437)..(437): n = any nucleotide
ganttccattactcttctttcctaatcacatcaagcattatggtttatatatacatacatgtacatttcttggtatggtcttcttgtttctgctgcaagtcgccttaaaccaagatcacgggccatcggtgaagggaactccggtggccggcaaccagctacctccagatagcaaacccctcacagtaaatctcagagcagtcgatggatcggtgataacatggtggccgcgccacctgactcgcctggaagtgtcagaccccggccctgtgttcttatactccccgtagtataacgtgttgagagcgaacccaccgctccattccaaccacccagctgcggagatcagatcatccatgtacgtacccatgaacacagttcgagagtaggcctgccatggccttcccaggtacgtccggaacttcccctgaaccggnctcaggtcggcgcggcgtcaccctgcagtgtggataacgatgccggtgttctggctgggatcggtccgcccctgcgcggta

SEQ ID NO: 5055 - DNA, 516 bp, Musa acuminata
tggtctacagtttacatgactatatattacaggaaatatggaaagaaataaaagaatgagagctacgaggaaaagcatgataaccaacagagccatagccttgcaagttgccacatacagaaatatcatgaaagaatctactcatcaaattggatactcagattcatctaaaattgcagcctggttaaagaaaaagcaagatgtcccataaaaccgccagaactaatatgacaattcatgtccgcgtattgatatatacttcttcacccatatggcgatatcatcagcacaggctagtgcctgaggtgtcctgaggagcatgtctagtgtggcaaactcatgaactgcatccttgtattctaggactggtgcatcaacattcacttttcggagcgcctcggagtatgcaattgctcgatccctcatccagtcatgttctgcaaccacagtgagggttggaggcatgcatttcatggtggtcccacccagaaacaacagggttgcagccggatggtc

SEQ ID NO: 5056 - DNA, 516 bp, Musa acuminata
  misc_feature (20)..(20): n = any nucleotide
  misc_feature (22)..(23): n = any nucleotide
  misc_feature (44)..(44): n = any nucleotide
  misc_feature (53)..(53): n = any nucleotide
  misc_feature (58)..(58): n = any nucleotide
  misc_feature (126)..(126): n = any nucleotide
  misc_feature (132)..(132): n = any nucleotide
  misc_feature (151)..(151): n = any nucleotide
  misc_feature (163)..(163): n = any nucleotide
  misc_feature (173)..(173): n = any nucleotide
  misc_feature (181)..(181): n = any nucleotide
  misc_feature (193)..(193): n = any nucleotide
  misc_feature (348)..(348): n = any nucleotide
  misc_feature (405)..(405): n = any nucleotide
tcatctgagttctttatgtncnnaatcattcacttagacaaacnaaagaaggntaganacaaccttagaacacaagcagcagaccgttcagctcccactctattgtgaatgaatcctggagctgantcaacntgcaaacatatgttcctantgcataacttantagaccaacncatccagntctctcgtcggntcagaaagcggctgaactcgttcgacggagttgatgctttggttcgggctggggaatatagtgtatcatagcttccaactccctttgctgtctcaacctctgattttcttcttcaagtctggagaccttgttctccagctcattcatgtaagccngcttcctagctcgtgaacgggcagctgactcacggttcttgatcattctcttctgcntcctctcgacagtcttcttcgtcgtgtcctccgaaggccccctcttccgccttggtgtttgtggatcaagtggggacaaactggctcttcaccatcacggtacctcgagtc

SEQ ID NO: 5057 - DNA, 514 bp, Musa acuminata
  misc_feature (81)..(81): n = any nucleotide
  misc_feature (205)..(205): n = any nucleotide
  misc_feature (330)..(330): n = any nucleotide
  misc_feature (463)..(463): n = any nucleotide
  misc_feature (503)..(503): n = any nucleotide
caattagtaaataaactggtaaccaagaaagagcataaacctaaaggcttaagcttattcgtacaataggattgcttgagnagtaaatttgagctgtgaaaggggaccaccttattttctccaaaatggtggtgcttattacaagcccttctttttggaatgccagttttcgatactactaaaccaattccactggaaacataancccatgaagcgcatgaatccggcaccaagcacctcagctaatgcagtcaagaatgagctctgtggggacaaaccagctgttgctatagatagcatagtcccctcgaagttgcagggaacaataanccttgaagatttgatgccatctaaagcttttttagcgacatcatcggccttcataccaccagaagaccctgctatgatattggtgagatctggccgcctcctgtgctcttcggcaaaacctggagtctctgtntctggaggaaatatcatggacactgaatgtcgtcagcaangacctcatgct

SEQ ID NO: 5058 - DNA, 513 bp, Musa acuminata
  misc_feature (2)..(3): n = any nucleotide
  misc_feature (6)..(6): n = any nucleotide
  misc_feature (9)..(9): n = any nucleotide
  misc_feature (22)..(22): n = any nucleotide
  misc_feature (28)..(28): n = any nucleotide
  misc_feature (48)..(48): n = any nucleotide
  misc_feature (64)..(64): n = any nucleotide
  misc_feature (93)..(93): n = any nucleotide
  misc_feature (105)..(105): n = any nucleotide
  misc_feature (108)..(108): n = any nucleotide
  misc_feature (121)..(121): n = any nucleotide
  misc_feature (124)..(124): n = any nucleotide
  misc_feature (153)..(153): n = any nucleotide
  misc_feature (157)..(157): n = any nucleotide
  misc_feature (173)..(173): n = any nucleotide
  misc_feature (271)..(271): n = any nucleotide
  misc_feature (289)..(289): n = any nucleotide
  misc_feature (293)..(293): n = any nucleotide
  misc_feature (312)..(312): n = any nucleotide
  misc_feature (322)..(322): n = any nucleotide
  misc_feature (362)..(362): n = any nucleotide
  misc_feature (382)..(382): n = any nucleotide
  misc_feature (411)..(411): n = any nucleotide
  misc_feature (430)..(430): n = any nucleotide
  misc_feature (435)..(435): n = any nucleotide
  misc_feature (441)..(441): n = any nucleotide
  misc_feature (443)..(443): n = any nucleotide
  misc_feature (447)..(447): n = any nucleotide
  misc_feature (459)..(459): n = any nucleotide
  misc_feature (463)..(463): n = any nucleotide
  misc_feature (479)..(479): n = any nucleotide
  misc_feature (481)..(481): n = any nucleotide
  misc_feature (486)..(486): n = any nucleotide
annccntanaaatgaaattgcnatgtgnctaagttacctacggatgtntgcatgcagtccaggnacactttggggtaaacacccatccaaacnactccaacaagnaanggtagaaaaaagnaancttctcttccattgagatcggagaatttntgtnggaaatcaggtttgcnatttccagaaaccacacgattatatagaaatagggcatacgctgcgcctaatatcatcccaagcgctgctaatgtggcaactaagctatttctttggnaagctcctactaagattnaganttccccgataaagctgctngtgccaggtnaactcatattagccaaagtgaaaaagaggaaaatggtagngaaattcggcatggtgctcnctaaacctccataatatctaacaagtcgngtcttatgtcggtcatctngaacnccaacncntagnaaaagggctggngaanccagtccatgacttancntcagnaaaatgctacctccaattccctgtatg

SEQ ID NO: 5059 - DNA, 513 bp, Musa acuminata
  misc_feature (246)..(246): n = any nucleotide
  misc_feature (295)..(295): n = any nucleotide
  misc_feature (334)..(334): n = any nucleotide
  misc_feature (497)..(497): n = any nucleotide
aaacaactatagtacataatttgggagaatcaaagggggagagggggaaaactagaatcctttactgttgctgttggttgagaatgcacatgctacgactgcaaactccactgtactcagttttgatactgtttgaatcaaggttagatgggtttcctacaatgatgttctgtttgacacggcaaactggattctagctatgaactcgtcgatggtcatcattccaagttcacctccaaacctcgntctgacagtaaccatctgagtctcgacttcttttggcccaacaactgcnatgagaggcaccttctgcttttctgcatttcttatgagnttcggtaggcgtcgccgtagcaaagctcagctcggatgccaatggaatttagctttgataccacctccgtgcagtacttgacctcagtatcagtcacaggtaaaacacgagcttggatcggggaatccacagtggaaagtcaccagcataatgttctataggncaccaaaaatctctcc

SEQ ID NO: 5060 - DNA, 504 bp, Musa acuminata
  misc_feature (29)..(29): n = any nucleotide
  misc_feature (83)..(83): n = any nucleotide
  misc_feature (179)..(204): n = any nucleotide
  misc_feature (380)..(380): n = any nucleotide
  misc_feature (415)..(415): n = any nucleotide
  misc_feature (420)..(420): n = any nucleotide
cacccaagcattacatctttaatgcgtantcgtacactatcctcgttgcaccttatgacttggctatatagagatcatctccngccattgctgcttactggccgcttgcagcttagtgcatgggggggtggccgccctggacatgggcgccaaatcctaatcccggaggaggtcccatnnnnnnnnnnnnnnnnnnnnnnnnnnaagcgcgagcctcggccgtcgtgggctgcagctgctgcacctgccgcttgaggaacttgacgtagcgaatggcctcgtcgagcatggtggcggtgtccatcttggtgccgccggggacgaggcgctgcaggatgcggaagcgctcgctgatccgctcgcgccggtgccgggcggcnacgctctgcgggtcgtcgctgatgcgcacgttgcncgccngggcttcctgatggtggcggggtcgacgtccaccggctgcatggcggcgatccggtacatcatctccttcacgggcgcccagag

SEQ ID NO: 5061 - DNA, 503 bp, Musa acuminata
  misc_feature (463)..(463): n = any nucleotide
gcagagtgtaagcataaatagcacataaatctcaagaaacttcaaatgacaagtaaacactatgcagcatatttaagaagcagataattgacactgacccaatcacctgtgaagtcagcagtttatatgacaccagcaaaatataaaaggcaaaagctctactctgtgttattcacgacaagagctatatcgcaggatgatacccaagattaaaagtcacttgtgcttgagtatttcttgtttgacccaactctcgacagcattccagcgaaagccgcagagcagcagccattcccagcaggatgagaacaccagttatgatgttcaccggacgtgaagaaattccaagagaaactgatattagtacatccaacataagtcctccaattataatggcaaatgcaacccaaagtgggttcaaccatcctctttcattttcttgttgccccctgttgtgacctgnatttaccctccaaatccagtaacttgtacttgactggggt

SEQ ID NO: 5062 - DNA, 499 bp, Musa acuminata
  misc_feature (7)..(7): n = any nucleotide
cgagttntcaacaaattccgcctcggtcgtaaaatcgggagcggctcgttcggggagatctatttaggttctaatgttcagtcaaatgaagaagttgcaatcaagctagaaaatgtcaagacaaagcacccgcagttgctatatgaatcaaagctctacggaatccttcaaggaggaactggtattccaaatgtgcgatggtttggcatcgaaggagattataatgttcttgttatggatttattgggtccaagccttgaagatctatttaacttttgcagtagaaaactctctttgaagtctgtccttatgcttgctgatcaaatgatcaaccgagtagaatatgttcactctaaatcttttctgcatcgagatatcaaaccagataattttttgatgggcttgggcaggcgagcaaatcaggtctacattattgactttggattggccaagaagtacagggacaccacaactcaccagcacattacttacaggagag

SEQ ID NO: 5063 - DNA, 498 bp, Musa acuminata
ttaaaaactcctagcttgatatttgaatatgtgaacaacacagattttaaagtcctataccctacattgactgactatgacattcgttactatatctatgagcttcttaaggcactagattactgtcattcacaaggtatcatgcatcgagatgtgaagcctcacaatgtcatgatagatcatgagcttcggaagcttcgcttgatagattggggacttgctgagttctaccatccaggcaaagagtataatgttcgtgttgcatcaaggtacttcaaggggccagaactacttgttgatttacaggattatgactactccttggacatgtggagccttggatgcatgtttgctggaatgatatttcgcaaggaaccttttcttttatggacatgacaatcatgatcagctggtaaaaattgcgaaggttcttggaacagatgagttaaatgcttacttgaacaaataccgtctagagcttgatccacaacttgaagc

SEQ ID NO: 5064 - DNA, 498 bp, Musa acuminata
  misc_feature (3)..(3): n = any nucleotide
  misc_feature (5)..(8): n = any nucleotide
  misc_feature (10)..(15): n = any nucleotide
  misc_feature (18)..(18): n = any nucleotide
  misc_feature (22)..(22): n = any nucleotide
  misc_feature (28)..(28): n = any nucleotide
  misc_feature (38)..(38): n = any nucleotide
  misc_feature (59)..(59): n = any nucleotide
  misc_feature (202)..(202): n = any nucleotide
  misc_feature (350)..(350): n = any nucleotide
aanannnntnnnnnnaanaacncaaacngaaaacaacncaatggtcatgtttggtgacngaatttatacaaccacaagtcttgcatgttacaaaagatttttgccaactttacctccagaatctctcagggactaacattagcacaaaaacagtctaagaacagtatgcaaagtcctccaagtgatggtgcaaattagagcnactaaattggatttcacagccagatgaacattaagctaaaattcgaaactccaagtgagctgaccaaaacattgcactctgaatgtcagaggattgtgcaaccacatctgttatgctttggggctttcgatggttgcttctcattgtncttgtcgagtacaggaggtcgaactacaacatgcatggtaattacaccaccaggaagctcaccaactggtaccctagactcagcaatggttcggttgttctccaatattttacccgcatttatgagcttcacgtcattgattgtttag

SEQ ID NO: 5065 - DNA, 497 bp, Musa acuminata
  misc_feature (8)..(8): n = any nucleotide
  misc_feature (13)..(13): n = any nucleotide
  misc_feature (20)..(20): n = any nucleotide
  misc_feature (33)..(33): n = any nucleotide
  misc_feature (113)..(113): n = any nucleotide
  misc_feature (129)..(129): n = any nucleotide
  misc_feature (146)..(146): n = any nucleotide
  misc_feature (172)..(172): n = any nucleotide
  misc_feature (301)..(301): n = any nucleotide
  misc_feature (305)..(305): n = any nucleotide
  misc_feature (443)..(443): n = any nucleotide
aattcgcntcctnacgagcngctgacttgaccntcttacggagctaccccgtcgtcgggaacctccctcacttcgtcaagaaccggcaccgcctcctggaatgggtgacgganctcgtcgccgcctccnccaccgccaccgtcacngttgcccccttcgtcttcaccgccanctccgccaacgtcgagcacgtcaccaaggccaacttcggcaactaccccaagggcgacgctgacgtcgccaccctgcacgacttcctcggtcgcggcatcttcaactccaacggggccgattggaagtngcancgcaagactgccagctttgagttcaacaccaggtccctccgcgccttcgtcctcgacaaggcccgccgcgagctcgttggccggctgctccccctcctgaacagggctagccggagcggcgacgtcgtcgaccttcangacgtgctcgagcggttcgcctttcgacaacatatgcagtttggtgttcgggat

SEQ ID NO: 5066 - DNA, 493 bp, Musa acuminata
  misc_feature (47)..(47): n = any nucleotide
  misc_feature (92)..(92): n = any nucleotide
  misc_feature (219)..(219): n = any nucleotide
  misc_feature (443)..(443): n = any nucleotide
  misc_feature (455)..(456): n = any nucleotide
  misc_feature (477)..(477): n = any nucleotide
tccgatttattgtcgaatctgacttttacgatttgatattgcaccgnagacatacatgtttaagtatgatactgtgcatgggtcatggaagnatcacgatatcaaggtgaaggactccaaaactcttctgtttggcgagaaacaagtcactgtctttggaattaggtagtcttcttcttatcctttctgatatagatgttagtaatcattatgtttganacactgcccttgtttgtgtaataaagctgttctggtctttaggaaccctgaggagattccatggggtgaggctggtgctgagtacatcgtggaatccactggtgtttttaccgacaaggacaaggctgctgctcaccttaagggtggtgccaagaaggtcattatttctgctcccagcaaggatgctccaatgtttgttgtaggtgtcaatgaaaacgagtacnagcctgacattnncatcgctcgaatgcgagctgnaccaccaactgtcttg

SEQ ID NO: 5067 - DNA, 484 bp, Musa acuminata
cgcatatggggatcggcctgatcttatgcagttggttgagacattgtcacaaaaatttgaatcattgtatgagaaagaggtgcttattctagtggaaaaaattgctgatcatgtgggtaatgagcctttagacactgaaaagcggaaagaattgtataatattattcttgcagcaaatgaaataccgaaagctccttgggaagagggagtttgtaaagtttgtggcattgacaaggatgatgacagtgttttgctatgtgattcttgcgactctgaataccacacatattgtttaaatccccctcttgctcggattccagaaggcaactggtattgtccatcatgtatcaggattcaatccaagaagcaggatctagatcaacacacagaagttaccaaacgccatatgaggagacatctgggagaggaaggtcgtgcttttcaagaggctctgtatcagctagcatgcacaatggaagaaaga

SEQ ID NO: 5068 - DNA, 467 bp, Musa acuminata
  misc_feature (10)..(10): n = any nucleotide
  misc_feature (18)..(18): n = any nucleotide
ttgctaaaanacctggangaaatttctgttgagaagctgcagtcacttcttgatcttgctttgcgttcaacagctgctgcttcagatccatgtcacgaggagttgacatgttgtgtggaaagagtttcattgctcaaaagactaagcacacttaaagatttggattccactgaaccttcagaaggtaatatacttcctgattctgatcctcagtctgagctgttcagtatcactggcttggagacattctgccttagttacaaggttcaatggccattatcactaattattccaagaaaagctctaacaaaataccagttgattttccgtctcctgttccactgcaaacacgtaaaccgtcaactttgcatggcctggcaagtacatcaagggtttcgtgccatcaacattcttggaacggccatcctcagatcttctatctttgtcgaagcatgattaaattatca

SEQ ID NO: 5069 - DNA, 466 bp, Musa acuminata
  misc_feature (356)..(356): n = any nucleotide
  misc_feature (424)..(424): n = any nucleotide
  misc_feature (458)..(458): n = any nucleotide
tgtacaaactggtattttggtgccatatcagttcaacaaattgtcaaaacattagaatttaaaatcttgaaataaacaattgatggaaaagtcaaaaactatgttttcaagagggtgatgtcaaaaagaattaatgatatctaaactttccagcaagtgttttccagaaaaaaattacaatatctcatatcagaaacaacataccatgatcagagcagaagaaaccttggcggcaccttgaaacaagaatcaacactattcttattttgagcaggagactgaactggcactggctttcgagtgtttgcagacacaatgttcgtaactggttctcagttgtatgtttacctgtcttncatctttaatagtggacagaatactaaagttaccaggtgaaggaccggtagggcatatgatttactcnagcatgacaacttcaacatgaagcacatttggcngatgtagc

SEQ ID NO: 5070 - DNA, 463 bp, Musa acuminata
  misc_feature (2)..(2): n = any nucleotide
  misc_feature (5)..(5): n = any nucleotide
  misc_feature (8)..(8): n = any nucleotide
  misc_feature (10)..(11): n = any nucleotide
  misc_feature (13)..(13): n = any nucleotide
  misc_feature (24)..(24): n = any nucleotide
  misc_feature (176)..(176): n = any nucleotide
  misc_feature (178)..(178): n = any nucleotide
  misc_feature (228)..(228): n = any nucleotide
  misc_feature (286)..(286): n = any nucleotide
  misc_feature (429)..(429): n = any nucleotide
  misc_feature (448)..(448): n = any nucleotide
  misc_feature (455)..(455): n = any nucleotide
tncanctnanncnttaaagatttnttacatactaaaaaactaattaaatgacagtgtaaaagaattggcttcctcatttgtgaaaataacagctacataactatgatcgttcatagctacacatttcttgattatcatcctatcaaaccataaaagcaatacctgtaatataaaantnaaaaactgaacatgtatttcagcacctgtgaatggcacaaatcgtgtgtnacaacacaagtgttactggttaccaccactgatgaacaagaactccagcatttctgantgatgtgaacagattcaagcattcccggtaggtgttcggatactttggactcctctgccctgggcagcacttttgccatcggttgtagtggcactcgaggaagagctcatcaatcaagcaaatagcccctgttttgaaaagcntcggcaccagatcaaactnggtcccntccacatc

SEQ ID NO: 5071 - DNA, 460 bp, Musa acuminata
tttatcctgactttcaagcaccacacagatggttactcccactctaaatctatatgtgatgatccacattgaaccacaaacaagagatgatttcagtgggcaatgacaacaaccctatatctagatttgaagcttttctaaaagctgctaacaatagggcaacatggaaataaaggagcccagagatgacatattacagaaagaccaaaaaaagaaggcttcctattcttatcatcctttcgataagagggaagcatagctatgagcatccaatgatcataactagatcctgagcactgcacacccgaggatgctaccacagcaatgtgtcatgggcgataagggacgccacgtaggcctctcgcttctaacatttaaggcatcaacatcagacagctgcttgatgcactgattcctggggccaggcccgatcactcctccaatcatgtagtctcatctc

SEQ ID NO: 5072 - DNA, 456 bp, Musa acuminata
  misc_feature (8)..(8): n = any nucleotide
  misc_feature (21)..(21): n = any nucleotide
  misc_feature (243)..(243): n = any nucleotide
  misc_feature (319)..(320): n = any nucleotide
  misc_feature (325)..(325): n = any nucleotide
  misc_feature (330)..(330): n = any nucleotide
  misc_feature (353)..(353): n = any nucleotide
  misc_feature (392)..(392): n = any nucleotide
  misc_feature (411)..(411): n = any nucleotide
aacaagcnacacgatttattngagatttggtgttcgagatgaaagcaactccaccagatttgatgccagaaaacacatcaagaaactttttagctcacggtgtggggagtgtgcaaagcctatcgagagcaagtaaacagctgctccaaccagcgcattgtgggaaggttgcaactacttaactttctgtattcttatatacaacatggaaagaaaaaagaagagattcatgtggattattgntcttcacactatatcacttcccttgagaatgttgtacttgcagagcgggcagttggcatggatccgaagccatttnnctatncatgnggaatggaagtgatggttgcatngcagtgcatggagttccaccccatcttcgtatgatgtgnggcaaatacaacactccgnatcctcccgcagaagaacacgctcacttgttgaaattccaccatt

SEQ ID NO: 5073 - DNA, 453 bp, Musa acuminata
  misc_feature (2)..(2): n = any nucleotide
  misc_feature (430)..(430): n = any nucleotide
  misc_feature (432)..(432): n = any nucleotide
tnccttccccttctctgtcaacctcttctgagaaggttatcactctttccttgtttctggtgtacagggttgtattctgggagctctgatgtgaacattaatggggttttggcaagggtgagagggcccttcaccccatctcagtggctggagctggaacaccaggccttgatttacaagtacatcgttgccaaagttgctatcccacccaatctgctcacccctatcaggagaagcctcagttcttctgggttccatcccttatcggctggaccttttggttcaaattcattgggctggggacctttctatctgggatattctggaaatgctgatccagaacccggtaggtgtcgtcggactgacggaaagaaatggcggtgctcgagggatgcagtcgccgaccagaagtactgtgagcgtcacatgnancggggccgccatcgttcaaga

SEQ ID NO: 5074 - DNA, 442 bp, Musa acuminata
  misc_feature (4)..(5): n = any nucleotide
  misc_feature (7)..(7): n = any nucleotide
  misc_feature (9)..(10): n = any nucleotide
  misc_feature (16)..(16): n = any nucleotide
  misc_feature (19)..(19): n = any nucleotide
  misc_feature (36)..(36): n = any nucleotide
  misc_feature (73)..(73): n = any nucleotide
  misc_feature (98)..(98): n = any nucleotide
  misc_feature (136)..(136): n = any nucleotide
  misc_feature (250)..(250): n = any nucleotide
  misc_feature (413)..(413): n = any nucleotide
catnntngnntcgtanacnatcaaacatttgtcacngttcaataataacaatcagtttatatctagcagaacnaaagaactaaaaagaaaaaggaggnagcagcactagaagcaacctacaccttccctctattanacacaaatcattgcctggatctggatttggctctccttgcctcctcaggggatgaaggaaacagctccacgtaccttgacccgatcatcatcttatccttgcgcatagcctttntggcaatctctgccgatgggaactcagcatatgcctccccggttgacctgccgtcggggcggcagacaatgtgcactttctcttcactcagatcaactccccaaagaagtccacgatatctgctgggttgcgcagtatgggagcccccgaagtttcaaggacntcggtgcactccatctggtctttgtcctc

SEQ ID NO: 5075 - DNA, 442 bp, Musa acuminata
  misc_feature (108)..(108): n = any nucleotide
  misc_feature (127)..(127): n = any nucleotide
  misc_feature (208)..(208): n = any nucleotide
  misc_feature (243)..(243): n = any nucleotide
  misc_feature (315)..(315): n = any nucleotide
  misc_feature (409)..(409): n = any nucleotide
ctctgctatggtttttctttcagagatacaaggaagatgatgatagtggctcggaactgctcatcatcaatgtctgaatttggtgatgataactttgagataggcaantgggagttgaaggagcttntgagccgtgatgggcatatgaagcttgccaccgaggtattctttgcatccatcgaccagaggagtgagcgagctgccggcnagagtgcttgcacggccttagtcgctgtccttgcngattggtttcagaagaaccaccatatgatgcccatcaagtcccagtttgacagcctcatccgagaaggctcncttgaatggagaaacctctgtgagaaccaaacattccgggaaattttcccgacaagcattttgacctcgaaacagtcttcaagcaaagattcgncccactctgtgctgttccaaggaagtcattcat

SEQ ID NO: 5076 - DNA, 431 bp, Musa acuminata
  misc_feature (93)..(93): n = any nucleotide
  misc_feature (137)..(137): n = any nucleotide
  misc_feature (291)..(291): n = any nucleotide
tgagaccaaagccatttgctaaacacaacagagtaacaaggttcaatcagccacctacaagtgtctagctcttcatgactagatttttcatanagaataaagttttcaggagttgagagtagaaacaggatggcaanaaaaacaagtgtttatggagctttcgcagtttccctggccgttgcaagcttcgccaaaaggcctgagagctggaggaaggaacccacaccatcacagattctcatatgagcaaatcctgtttccttcaggaattccagcttcaaaaattcagcnatatcatagttcttgataactcggaagagagtggtgattatgtcggtgggggagtaacccagatcgtaaagctgtttcaagccagcacaggcatcatcaaaatttccttcaagcacattgcgaaccatattctttacatg

SEQ ID NO: 5077 - DNA, 421 bp, Musa acuminata
ttgacataatctcagttgaagttctaccgaacgctgcgctgcgcatcgaagaaagcgaacaccagtaagtctaaccagtcatttcatcaaacaccctcgatcgccttcaccctcaccggcaggcctccctccatcctcatggtgaacgtcagcaggtgacgcggctgcctcctctcctccgccacctccacgttaaacctctccaagatgccggccaccagcgccttcatctggatgtaggccatgtccttccccaggcacatccgcggccccgcgtggaacaccgggaacacgaacgggctcttcggccggaacactccctcctcgtccagccacctccacgttaaacctctccaagatgccggccaccagcgccttcatctggatgtaggccatgtccttccccaggcacatccgcggc

SEQ ID NO: 5078 - DNA, 420 bp, Musa acuminata
  misc_feature (72)..(72): n = any nucleotide
  misc_feature (206)..(206): n = any nucleotide
  misc_feature (248)..(248): n = any nucleotide
  misc_feature (371)..(371): n = any nucleotide
tgaaatgacgtctcattggattccatgagcaaatcctgcaaaatttgcgaataaaaataagtaatcaacaanaacaagaagcaaaaactgcatcaactgcttttaatccagctttgcaatgactgcatcaacgacttcttgggtcgtgctgcttcctcccaagtctttagtcctgtacttgccttctgctattacgcgcttcacancggtttcaagccggtctgcaaaggatgggaactgcaggtgcntcaacatcatcgcagatgatagcagcagggccaccgggtttgccttctggtgctccacaatcttctcattccctacgttgcctgctgaagcaccttgctcaaacactgcatgatcttgaccancattacctcctggcatgacaccagtgcctccagcaatacctgcagctgt

SEQ ID NO: 5079 - DNA, 407 bp, Musa acuminata
aatatgctagttgtaattatattacaaacaagggcatagcctcataacacagtccataacatgcagtactcgttatcttcaacaactctatcgactgaaaggaccaggcatgcagatttcgatggttgattataattacccatgtcatccgtagcagcgaatggggtcactacaacctttagctgcagactgcctgaaaccaaagcgtccgcctttctcaagatactgctgatgatactcttctgccctgtagaatttctttgcaggaaggatttctgtcacaatcttcccattaaggaccttctggcgcctctccatggattctctggctgctttttcctgttctggtgtgtagaaatatattccagagcgatattgagtcccaacatcattccctggcgattcag

SEQ ID NO: 5080 - DNA, 401 bp, Musa acuminata
  misc_feature (2)..(2): n = any nucleotide
  misc_feature (7)..(7): n = any nucleotide
  misc_feature (14)..(15): n = any nucleotide
  misc_feature (52)..(53): n = any nucleotide
  misc_feature (78)..(79): n = any nucleotide
  misc_feature (84)..(84): n = any nucleotide
  misc_feature (111)..(111): n = any nucleotide
  misc_feature (124)..(124): n = any nucleotide
  misc_feature (151)..(151): n = any nucleotide
  misc_feature (163)..(163): n = any nucleotide
  misc_feature (210)..(210): n = any nucleotide
  misc_feature (223)..(223): n = any nucleotide
  misc_feature (229)..(229): n = any nucleotide
  misc_feature (231)..(231): n = any nucleotide
  misc_feature (235)..(235): n = any nucleotide
  misc_feature (249)..(249): n = any nucleotide
  misc_feature (253)..(254): n = any nucleotide
  misc_feature (258)..(258): n = any nucleotide
  misc_feature (260)..(260): n = any nucleotide
  misc_feature (267)..(268): n = any nucleotide
  misc_feature (270)..(270): n = any nucleotide
  misc_feature (274)..(274): n = any nucleotide
  misc_feature (280)..(280): n = any nucleotide
  misc_feature (294)..(294): n = any nucleotide
  misc_feature (296)..(297): n = any nucleotide
  misc_feature (300)..(300): n = any nucleotide
  misc_feature (347)..(347): n = any nucleotide
  misc_feature (354)..(355): n = any nucleotide
  misc_feature (370)..(370): n = any nucleotide
  misc_feature (385)..(385): n = any nucleotide
  misc_feature (387)..(387): n = any nucleotide
  misc_feature (390)..(390): n = any nucleotide
cnaccantcaaggnnactggggcaacccctccataaataatgggaacatcannaacttcccagattccacaatcttgnntaagnagcacacgcatgccagcattaacaagngcaatatcatccncccttcggtgtgcttgcttaaactctntgacaaattccnaacttctagtccatggtagggaaactgagagtaaaacttcaccattngcaagatcagctntgaggnanccangaaaaaactctttngcanntacngncctaacnntncctntgcagntcatgatcagcatnanngcncctgccagccatccaaagtggattcaagtctgatattggactagcantgcaggnntttccaccgacagangcaacatccctggancngangtccagcgaac

SEQ ID NO: 5081 - DNA, 399 bp, Musa acuminata
  misc_feature (7)..(7): n = any nucleotide
  misc_feature (18)..(18): n = any nucleotide
  misc_feature (35)..(35): n = any nucleotide
  misc_feature (43)..(43): n = any nucleotide
  misc_feature (50)..(50): n = any nucleotide
  misc_feature (57)..(57): n = any nucleotide
  misc_feature (117)..(117): n = any nucleotide
  misc_feature (140)..(140): n = any nucleotide
  misc_feature (172)..(172): n = any nucleotide
  misc_feature (189)..(189): n = any nucleotide
  misc_feature (238)..(238): n = any nucleotide
  misc_feature (257)..(257): n = any nucleotide
  misc_feature (274)..(274): n = any nucleotide
  misc_feature (306)..(306): n = any nucleotide
  misc_feature (356)..(356): n = any nucleotide
  misc_feature (370)..(370): n = any nucleotide
  misc_feature (387)..(387): n = any nucleotide
ccgtctntgagtggtttnaagttgtccagaaagtnttttagcnatatttntgaaggncgtaaccagttggagaccaaccaatgaagccacttgccgataaaccctaggaggagtgcntgatagggcaattacaaagtccntgcatttctcaaacaaaaccttatcaaacaanggtccattttggcatcnagaaccaagttgtccccgaatgatgcgagattttctttgaagcttttangctccttttgctttgagtnaacatggtcttccactncgccatttttagctagctcccacaagtgagancacaacattcatccacatcagtctcatcaaagggagcggttctagttganaattggctcccacnagcctcaaagagaaacnttagaatctcaa

SEQ ID NO: 5082 - DNA, 396 bp, Musa acuminata
  misc_feature (319)..(319): n = any nucleotide
  misc_feature (390)..(390): n = any nucleotide
aagcacacataatttatttaatggaacttccaaaactttattgaaatcaaactatctcaaacatatttcatcatgagttctcgcatctcctttccaggggcttccaaacctgtgaacagcttaaattgccccattgcttgccttatgaacatctcaaatccaccaacagtggggactccacattcttctgcctccctcagaagcctcgtcactttcggggcgtagaccgcatcgaacaccaaggcgtagtgcccgagagctcgcttagcgagaggagtctcgcccacgtttggctgcatgcccaccgaggtcgcgtttnccaggatcattccgtcctccgggtggaagttctccagctcagagagtggcagtgcctgcccaccaacttgnttcgcc

SEQ ID NO: 5083 - DNA, 383 bp, Musa acuminata
  misc_feature (4)..(4): n = any nucleotide
  misc_feature (7)..(7): n = any nucleotide
  misc_feature (361)..(361): n = any nucleotide
  misc_feature (368)..(368): n = any nucleotide
aganaancatgatatctgctgctgacagaaatgcatgggcgacattctttgcaaggcagggaataaaagttgttttctctaatgggcagcttggaatgggaaccatgaaacttgggagacttgcaaagtcattagctgttagtgtgaataccaaacgtagagcaaaaggactactccctcgtccagtgcgtgctggaatagttggttatcccaatgtaggtaaatcatctctaattaaccggttgctgaagcgaggatgtgtccagctgctcctagacctggagtacaagagaactgaaatgggtacgttttggtaaagatctggagttgttggactctcctggcatattgcccatgaganttagtgnccaggcagctgctat

SEQ ID NO: 5084 - DNA, 1575 bp, Musa acuminata
  misc_feature (342)..(342): n = any nucleotide
  misc_feature (1560)..(1560): n = any nucleotide
acaaacacatcaatcccatgttatgcttggtgctggtcttgttgcaaagaaggcctgtgaattaggtctacaggttaagccttggatcaaaaccagccttgctccaggttctggagttgttaccaagtatttgcttaagagtggcctacaagaatatttgaatcagcaaggatttaatattgttgggtatggctgcacaacatgtatcggaaactctggggatcttgatgagtctgtggctgctgcaatttccgataatgatatagttgctgctgctgttctatctggaaataggaattttgagggacgtgtgcatccattgacacgagctaactatcttgnttcgcctcctcttgttgtagcttatgcgcttgctggaacagttgacattgattttgagaaggagccaattggaacagggaaggatgggaagagcatatacttcaaggatatatggccgtccactgaagagattgcacaggttgtgcaatccagtgttttgcctgaaatgttcaagagtacatatgaggcaatcacaaaaggcaaccctatgtggaaccagctgactgttcctgcaacaactctttattcatgggacccaaattccacctacattcatgaaccaccatattttaaggacatgaccatggctccacctggtccacatggggtgaagaatgcttattgtttattaaattttggcgacagtattacgacagatcacatttcaccagcaggtagcattcacaaggacagtcctgctgcaaagtacctaattgaccgtggtgtagatcgcagagatttcaattcatatggcagccggcggggcaatgatgaaatcatggcaaggggaacatttgcaaatattcgtcttgttaataaactcctcaagggagaagtgggaccaaagactgttcatatcccaacaggggacaaactctatgtctttgaagtagcaatgagatacaaggctgatggggcatgataccataagttttggcaggagcagagtacggaagtggtagctctcgagactgggctgccaaggggccaatgttgttgggagtcaaagctgtgatagctaaaagttttgagaggatccatcgcagcaatttagttgggatgggtatcattccactttgtttcaagcctggtgaggatgctgagacactgggtttgacaggatatgagagctatacgatagatcttccaagttgcatcagcgacataaggcctggtcaagacattactgttgttaccgactctggaaagtcttttacctgtactcttcgatatgatacagaggtagaactggcctacttcaatcatggtggaatccttccattcgtcatcagaaatcttataagttctcaacactagggtgtatgtttctttgtgatgcctcgagctgtcagcattgctggtcttgacctcaattggagtgggcatttcgaataaattagcaggataaggaggcacttctacaagtcatttgcctgtttgctaatgtattttgtgctgataccacagttgcattcaaacttatatatcttttcaganccaatgttattaaac

SEQ ID NO: 5085 - DNA, 960 bp, Musa acuminata
  misc_feature (931)..(931): n = any nucleotide
  misc_feature (940)..(940): n = any nucleotide
  misc_feature (948)..(949): n = any nucleotide
  misc_feature (954)..(954): n = any nucleotide
ttcatcgatttatttagtagaaagaaatgtaacttgtttgatcaaattgatccacaacttataagcaagttgcatccaacacagcagattgaaatgactgttcttttctgaaacacctactacatgaatgtgagtttttgaaccaaattgatgcaactacttctgatgatgagctcctcgtgatgctaatgtacaagttgtggaattcagtaggggttacatcttttagctccatgtttgatccagaagaaggttagctaccatgagatgtgccccttgaggaagcccttgcagagccttttccaagcctcttgatctggttcttgtgcatccaagcttgcctttgctgcttcagcatgacaagtctgaatgagattacgctggagcaaacgatcgacgaggtgcaggagaatgtctttgttgtactccgggtgaccctggatgcccatgatgtgatctccacatctgaacatctcgacgccggtcttctccgagcaagccatcacttccgcatggggcggcagctgccacacctcgtcgcggtggaattcgatgacagggagatgagaggggatgcggagagaagccagcagcttgatggtggagtgaagctgctgaagtggaacacagaagcagtaccaggaaggagctattgcgagctattcaggttgcagagagagcagaaaaacctccgttgagcgagctattcacagatgtgtatgatcaagttcctgcgaacctgcgggagcaagagaaatcactccgcgaaaccatcaagaaacatcggaacgactatccatctgatgtgccggtctagtagaacatccaaaggcccatatctgtagttcattacaactctgttgtttctgggaaccatcaatagatgtattccaagaacaaaggatagaataaatgtaaacaagttgaatanccaaacatncattatanngtttntagtta

SEQ ID NO: 5086 - DNA, 711 bp, Musa acuminata
gaaaaatggattatgtgcggtccatcgtgttgttcaatcgaatgcaaccatataactattctacataacacaaacgcaagggcaaacaaacattcatgaagcagaacaaaaagcaacaaaatctttgagagtaacagtactatttcatgacaattaatcgggcatctagttcaacaataaagaaaaaggaatccgtagctttctcaagaatattgcttaagaggaggctccacttcgaagggcttgacctttcttgggcttgctgggagcaatttgggtctccggctccttcttgactgactcttccttctctgacagaatcaattcaatatggcatggggaggacatgtaagggttgattcgtccatgagcgcgataggttctacgtcttctgctttggagcttggttcacctggatgtgtgatatgtagagagcatcaacatccagccctttcacctcagcattactttctgcattcttaagcagatccaaaatgaaaccagctgatttcgcaggccaacgtccctgcccatttgggtgacggctcttggcttgagctgtacgcccaacacctccacagaaccttcgaaaaggaattgcctgcttgtgagcaattacatcttcaagatatcttttggcctttgataatggtagctttctaagggatgggcggtctcgcgtgtatcttgaagtgaaccctcaagtcctgg

SEQ ID NO: 5087 - DNA, 683 bp, Musa acuminata
  misc_feature (4)..(4): n = any nucleotide
  misc_feature (8)..(8): n = any nucleotide
  misc_feature (20)..(20): n = any nucleotide
  misc_feature (30)..(30): n = any nucleotide
  misc_feature (657)..(657): n = any nucleotide
accnttanaacatcacttancgagctttcnacgaatatattgtctatcttatggcatagaaaacaactaacagtaagttacaaagaacaatccttttaacaattttttttcgtatttaagatgagaatttcaatatgagcttgtcgacatgaatgattatatcatcgatgttcggccgcatcgcaggttggggctgtaacatccagagcacaaactggtggaggttctcaggataaggagggttgtgtccagatggccatttaatctgtgcattcatgacagctaactgtaagcttcctccggattcaccgagtgcatactcaaatggtgatgttccgtacattatcgcatacagggtacaaccgagcgaccagatatctgtcctctcatcaatatcagcatggcttggacagtcccacagctcaggagcacggaagggtgcagaacagtgctcactggcccattcctgtaactgtaaagcctctgatctcgaacgaatttctttccttgcagggcgtgcacttccaaaatccattaaaatagcaagaggaggttgtcccttcctgtgagttatgagaacattaccaggtttcgcatcattatgagctatggaggatcaaactgtgatgtgcttcggaccagcacaaagctgtctgnaaatctgaagaacagttgttgttgta

SEQ ID NO: 5088 - DNA, 439 bp, Musa acuminata
  misc_feature (4)..(4): n = any nucleotide
  misc_feature (18)..(18): n = any nucleotide
catnaaatatattggtantgaaataaagcatatgggatgtgatcttaccggcattaatgcatcagatcccataagaagggagcaattaaagtagaggaatttatagtcatgaggtcgatgatgaaccatcccgtcgaacgcccaccgctgaagtagtagcactgctagtcccaccggcagcaggcagagccgaagaggaagactcccccccagcttccgaattcttctcgggtactgtagcggcggaagcggatgccgaggcagcggtggccgcagacgggtctcgcttacgcttcttcttctcgtaagggatgccccgggccttcgcctggctctcccgcacctccctgaggtaaatcctgacggggcgggcggcgaaggggttggactcggaccggccgccgctctcctcgtaggccgcgcggaggcggccgatgaa

SEQ ID NO: 5089 - DNA, 495 bp, Musa acuminata
  misc_feature (402)..(402): n = any nucleotide
  misc_feature (447)..(447): n = any nucleotide
  misc_feature (457)..(458): n = any nucleotide
  misc_feature (468)..(468): n = any nucleotide
  misc_feature (474)..(474): n = any nucleotide
  misc_feature (481)..(481): n = any nucleotide
acttactaaaataaatgaacaaatgagcacaaagttgacatttttttttgtctttctccctaaaatcaacgaaagcgtggaggagagtactctaatggaggaaagagttcgctaagggggaaggattttgctttaacgagagggtgggcggtggcgccctggtgttgctccgcagctcccgggcagctttctggcggcgcaactccaggatccggcggtgggagttggagtggatggcggcggaaaacgtggggctgctcgccggccggtactccggcacgaggcggaccggacttgtacctgacgccgcacgcgttgcacagcgtcttcggcccctccggccccgcccgccactgcggcgtctcttccgccccgcagtgcccgcagcagcgcctctccacngccgtcgctctcctcgctgcggttatgcaggccggctccgggganaggccggcannacccttccgncgccgnctccgtnccttgctcctcggt

SEQ ID NO: 5090 - DNA, 502 bp, Musa acuminata
  misc_feature (450)..(450): n = any nucleotide
  misc_feature (487)..(488): n = any nucleotide
atacgaaacaattctttcatggcaggcagcgtctcatgaaccccagatgagagcatcgaaacctacaggaggaagtgacatcacaccagacttggaaatctaaatttcatgaagttgaggaggaagaggaggaggcaatgcaggaggaggacacggctcccctcgtcgccagcagctgcgcgatggcctcgtagcccatggacctcgccatgaccagcggcgtggctcccctgttggtcttggcgttgacgttggcgcccatgtcgatgagcgtctccacggtctccaggcacccgccctccaccgccaggtgcagcggcgtgtgcccctccacgtcttggcactccaagtccatgccgaagtcggccagcagcgccaccgcgtcgcgtgtcccttgatcgccgccgcgtggagcgccgtcaggccgtactggtcgcgactgtggacgcngacgcgcttcctcagcaggcactccagccggcgaggnntcctttcctcgatg

SEQ ID NO: 5091 - DNA, 454 bp, Musa acuminata
  misc_feature (5)..(5): n = any nucleotide
  misc_feature (11)..(11): n = any nucleotide
  misc_feature (26)..(26): n = any nucleotide
gagcncattanaaggagaggttgtcnttttacacgaatcacatacgagtcttgtttacaacaccaatataacaacagcagtatcatcaataacaataacaattatttaagactcagaacagaaccaccaagacaacataccaaattcgtcacttttccttcctaaaaatgggtatttcctcggattggagccgagatctgcatgatccccctctttaacctcggcactgggtgatggcggacagctgcgagagtaggggttggcctgggcgccggggcggcagttgtagtaagaggcgccgcgtcgggagccagggcacggtgtcgcgcttgagcgcgccgtagctgatgtagctggaggtagccaggaagcggcggctcacctcggatcccaggtcaaactcctcgcccgcgaggcactccggcgatgctgccgcggcagccggagagggacg

SEQ ID NO: 5092 - DNA, 633 bp, Musa acuminata
  misc_feature (4)..(4): n = any nucleotide
  misc_feature (576)..(576): n = any nucleotide
cagncacgatctaataaatgtaaacaaatcaattacatatttatagcttcttggggagaccaaaacccacgaagaataccactaaacacctctttgatcccttcgcttggggcatttcggcaagaagaagaagaatactacagagacttatcctccaattacgtgggaggcggaggacgcgagaacaccgcaggatggagatcacgcggaggggaatgggctcgctagcttcgctctaagatccttcctcagtatcttgccggatggcgccttgggaatggcctccgtgaagaacaccttgttgatcctcttgtagaataccacctgcttcgagacgtactgcttgatctcctcctccgtgacctgagacccattgcacctcacaacgaaagccacagggacttccccggcgagttcgtccttcatcggaacgacggcagcatcggcaatgtcgtggtgggtgatgagcaaggcctcgagctcagctggggctacctggaaccccttgtacttgatgagctccttgagcctgtccacgataaagatctcgtcgtcgtcgtccaacaagccgatgtnccccgtgtgcagcaagcttccttgtctatggtgttctcgtcgctctggatattgaga

SEQ ID NO: 5093 - DNA, 637 bp, Musa acuminata
  misc_feature (76)..(101): n = any nucleotide
agcttctgtatcactggtagcttacaaccaacctggaggaacacaagctccgctgcctaaaacttcctccccattnnnnnnnnnnnnnnnnnnnnnnnnnnacagatgaacgagctcaccgagctccgataacctgagacgtaaacccccgaggcaccaaaggcatcgtatgcagcaatttgactggcgtgaccggccatgaacgatggacgcactgctgtggcggtgccataatcctccggttgaggcctgctctgtaagtgcgccccgcttcctctggctgcaggaacatcatggttgtgcttgccttcatacgtggtgatcactgaactgggatcttgcgatgccctctccacatgtttccttacggggcagcccatggtagtgcatttgtaataactcctcgggtttggattacccttcaccaccttctgcccatactttctccaacggtacccgtcgtcgaggatatcgacatcgctctgtgtctgcacaaccactctcggctccctcgtaaccctatttccgggagctgataactcttcatggtcaccttctgtcttccatcgttggatctggttcggtttcgtccaaggttcactccccgattgctcctccgagagctcaaatcgatgta

SEQ ID NO: 5094 - DNA, 497 bp, Musa acuminata
taaaatgtttgatcataggttgttcatccctaatctttagggaaacaaatttattgaacacatctacaaaactgaggagaaaatttgaaggtacaacaactccagcaagatcaactcactccagaatagagctaagtctatttaacattggcattaacattgcattcaggcatcatcaagagcaagaacacctggcagaggcttgccctctagcagctccaagctagcaccgccaccagtcgaaatgtggctcatcttgtcggcaagccccactttctctacggcagccactgaatcaccaccaccaatgatggttgtgaccccagatgcactcaactcagccagtttctttgcgattgcctcagttccaagtgcaaacttctcaaattcaaatacccccatgggtccattccatatgatggtcttggtggtatccagggattcactgaatgtcttgatggagtcgggaccaatatcaagacccatccatccatcag

SEQ ID NO: 5095 - DNA, 600 bp, Musa acuminata
  misc_feature (519)..(519): n = any nucleotide
agaactcttgtttccttattgattccttcaagtgttcttctttctacatcagggacttgaactccaaacataagcttgcaatacaattcaaccagagacgaaaatgcagcagtgatttccacagttcgcccaacagatgttgtggctaatgaaagttgtggtgatcaggccatggccagaaggcagattgatctccgatgctgcacagcaagttgctgaagctggccttctggggcgtcattctcgaccttcgggcagtctgggtcagctggcctaactgattggaagtaaggcaagatttggagagggggacaggacctttcggcgaccgatgttcttgagatgtccaagttgatctctgagctgttctcgcttctgttgctgcaagaaccctcggtctctttgttgagattgatgagatctgatgcttctctacctctgagagccaaggcctcagtctggagtttcttgttgtgggcttgcagagcttcattctcggctttaatggcgtcaaactgnctcctgagcacatcgtaatccttctccagttgcttcgcttccacctcgctctcctgttctggaaccagatggccacctgcc

SEQ ID NO: 5096 - DNA, 651 bp, Musa acuminata
tagatctataatgagtggttttctttcgccgattcagatggagatggccggatcacggggaacgatgccatcaagttcttctccttgtcgaatctatctcgccccgatctcaaacagatatgggcgattgcagactctaaacgacaaggctttcttgggtttggagagtttgttacagcaatgcagcttgtggctctagcacaagcagggaatgagattacccaagatacacttgctaatgcagacttggagaaattgaatccaccagtgatggaaggtttagatactctgctctctagaaataaggcgtcaacaaagaaaattgatcctgagatagatgtgaactctaagccacaaaatcctccatcaaccgttcagtggtttagttcaaaatcagcgaagaagatacctctgagccaagttacttcaatcatagatggtttgaagagattatacgttgaaaagctgaagcccttggaagttacttaccggttcaacgattttgtttcaccccttctgacaaacagtgattttgatgctaagcccatggttatgctcttgggtcaatattctactggaaaaacgacattcataaaacatttactcaaaactagctacccaggtgctcatattggatgagaattaggttgt

SEQ ID NO: 5097 - DNA, 588 bp, Musa acuminata
  misc_feature (453)..(453): n = any nucleotide
  misc_feature (536)..(536): n = any nucleotide
gattctcttagtacaaacgaataaatcaataaacatttgtttttatttcggtatcagcagacttccaagccgtagaggactccggcgtgctttccgtcgtcgttgcccatgaagaagagctccttcatccgtcggaacgcttgccaggttagcaaactgtccgaccccgcctggtggcaccgccccaccgcccggtcgacctggagcgtgctcgccacgcgatccaatccgccgtacaggctgtggcagtgcttgatcatgtgcttcatgtcgaacaccctgtccccgaagaagaccctcaccaaacccatgaaatcgcccagattgctgggtaatctgcggcaagttaagatctttatcaagtacccgaagtcgtacgcactgtggaacgtcacccagctcacggccgagtcgttgcacaccagcccggacgacatcaggagctcggcgaanggcgggagtcgatcccccgcgcccggttcttctcgaaatcgatcccgttggacctgaggaggtcgatggactcgggggcgtanggtcgcggtagatgtcgaaatcgcgaaagttgaactccagacgtagcggacc

SEQ ID NO: 5098 - DNA, 566 bp, Musa acuminata
  misc_feature (467)..(467): n = any nucleotide
  misc_feature (480)..(480): n = any nucleotide
  misc_feature (496)..(496): n = any nucleotide
  misc_feature (498)..(498): n = any nucleotide
  misc_feature (501)..(501): n = any nucleotide
  misc_feature (530)..(530): n = any nucleotide
gaagaaacctttttatgcatcaatcaaaaactatcttacaagccacaacaattcatatccgtattggtgtacaataacatatcttgaaacatctcttatggaggaaaaaaaggtagaaaaaggtttgattaccactaacaacaatgtccaagaaaagaacaatgaattgtggttacctcagtacaacatatcagaactgaaagctatgtaattgaagagacgtagaaattgcttggtttaccggcattaagcttcaggtaacacttcaaaatcaaccctgagttgcgagtcatcgtcgtcggagacgatgccacctgccctccttgccttccacttctcgtactcgggatcgtcggtcggcagctcgaaccggcagacggggcaggtgttccggatccccagccacggcaagatgcagtcctcgtggtagaggtgggcagcaaggcagctgcttgactctttccccnaccaagatcccgnctttgcaaaccgcgcncngangttcgccttggcaacatctcctccgtgangagaaccgacggaagctttctatccccgatttggct

SEQ ID NO: 5099 - DNA, 605 bp, Musa acuminata
  misc_feature (520)..(521): n = any nucleotide
  misc_feature (534)..(534): n = any nucleotide
  misc_feature (548)..(548): n = any nucleotide
  misc_feature (552)..(552): n = any nucleotide
  misc_feature (572)..(572): n = any nucleotide
  misc_feature (583)..(583): n = any nucleotide
tttaataatgtgattttgccttttagctttgcagcacacgacacaaatataggtttttctttgtaaagcaatctcacccgttcgattcgtcgatcgattgcatcatcacccaatcatggtaattataggaggtaaaaatacccacaactcccctgctctaatctaacgaggaggaggaggatggcgacggcggcgagttggaggaggaagtggggccccatggggtcatgtccgtggggtagctaccgagaaggcggaggaaggaggtgaactcctggatctcggcgagggcgttctgggcgcgggtctccgccatggacgcctggaagtcgatgtagaacatatactcgaagtgcttggcggtgccgacgttggcgtcgtcgacaaggcggatggggcggtggcggtgggggcggctctcgatcttggtcaggcagatgttgcggaaggcgaaggcggagagcaccttgaagagcacggaggtgccctcgccgtcgtgggcgaagacgatgctggtttnnaaggggcggtcgntgcgggggatgatngctnccgcgccacattcacgaacntcgtcacgttncagccgtcgtctgatcccgtcc

SEQ ID NO: 5100 - DNA, 1078 bp, Musa acuminata
  misc_feature (1075)..(1075): n = any nucleotide
aacattgtttggacaccagtgtataggcacaaaatccttacagatatgctcagaaacaatgtatcaaaacacaaggtgtaggactattttgttcaatatgcatcacaacatggaataaaattggcttatcttcttcaaaggcaagactccgttctgtagaagatgtaacgagatcaaggaattgatacttgaacaggtgcatgcttggcaggatgctctactgctacaaccctttaaaaggtctcaaagatactatcaagccgtgtatcaattatattctgtgttcctgttcagcagcaactttctctttcgtcttcgatcccacatcacttgcagccttggcaactttgttgaatgcaccagttacccaggatgctccggtgaagacatacctgttcttcatgattgcagatcctgcaacacttactttctgctcagctgcagcaaaggctgacttagtcttctcggagacctggaacttctgatccatttccttgaccttttcattgacagctgaagtacccatgctgatcttctcagtcaggccaatttttttgtcgaatgatgaaaccttggcactagctgtggatgtgagttggtgcttctcatcgaaagcttttgctttgccgatagcatctttgcctagaataaagcccttggcgagcataccggtgacaacatcttctgctttctgagaagcagattcagcaccaccagtgactttgacctctttattctaagaaacaaacaagcttcatcacacagtaaaaaaaaagaaagatggaataatggttcaagagaaggcatgtgtcatgcactctaccacagtaggagctgaaacagttacaggtaattggtattctggagcaggtgtaacaataacagagagatcaactattgttgccccctgtacaatgaacaaatgacatctgagagaagaagatttataaccaataacagaaacacaaaccaaggtccctttgttggttctacagaacgcagtacaactttgaaatgaaaaattactcttttttgaaacattttttagataatagatggataattatatttgcanagt

SEQ ID NO: 5101 - DNA, 591 bp, Musa acuminata
  misc_feature (27)..(27): n = any nucleotide
  misc_feature (88)..(88): n = any nucleotide
gtcacttgagagatttttatgaacatnaatgcctgcagaccccagcaagctcatcaagactaatacaaagccaggctttataagatangcaagcagcaggatgaagtacagaagacatggactgaagtccaaatgttccacaagagagtgtcaggtatttgttttacatttacaataatgccccatggtagcatgtaagcattgagttctggtacttttattccataaaaagcacctcgaaaaaggaatatatttcaaaaatatcagtaaaaacttctgcaacttattgaaaactctgaactctcctcctgtgtctgcagatgagtgctaattcttcagtatacccagctgttttagggctgactgaacgtcattggtgccacaaccctcaatctgaagaatattagggctgtcgaatgccacaacatctttcaacagatagcttctggtcgaatggacctggcttggagcagtgttgaatgcacctttcaaaatgacagtcttctgcactccaccaagtaatccttcataatctgtatcaccactttcaccaacaaatactatcatgtttgagagctctatgccccacct

SEQ ID NO: 5102 - DNA, 430 bp, Musa acuminata
  misc_feature (5)..(5): n = any nucleotide
  misc_feature (387)..(387): n = any nucleotide
gatancttacacagagaagtcatagcaagaaaaagaacagaggtctcctgctactactacttgactcagtgcttccttacatgacaacacaacctctggtgttgtcatcactgaaaagatgagttacatactcgttgtatgattgattgctctggagataaggactcggatggcaattgtagtaggcagtgtaaggggatatctgaggggacctgagatacatcatctgcggctgcatgtatctgttgtcatgcaccctaaaattgctcatcatgggggacggatgggcctgatatccctgcatgttcaccatcatggggggctgatgctgccctccgccatgtgaggggaggcctgcgtaccatggaagacgtttccttggaagcntcctcgattgctgtttccaccgagcccacccaggccgagacct

SEQ ID NO: 5103 - DNA, 980 bp, Musa acuminata
  misc_feature (13)..(13): n = any nucleotide
  misc_feature (15)..(15): n = any nucleotide
  misc_feature (856)..(857): n = any nucleotide
  misc_feature (956)..(956): n = any nucleotide
gcacggatgttcncntagatgtttaagactgtagtacaatgagcagtaccctttactgagatttaggaaaatgctgaggtaaagaagtggacacacaatcgaacacttgaaacaaagaagccatctctggcttctgcatttacctctcccatcaaaccatattacaactagaagatggctgacatagcagtttccagcttaaatacatgtcttcttcgcttgtatcatggaggaagctgatgttactcggtggagaaggaagccatggcatgacagaagagagagagcctgatcaggttcttatctgatctggaaatgcttgtacgcaggatttccagggaggtcagcctccctgcagcggtttgatccttctggctgcgtgtcggtagagctcttcctgcgccgctcattgtggccagccaggcgcctgcggcagctcctcttggagtcgtcaaactctgctagctcatggaacctgctgcattgctggcagaacctctggcggaggccggcgaccacgacgacggcagccttggagtgggcctcgcagaccttgtgccggcggtgtaacgtttggcctcgcggaggtcggcggcgcaatcgtcaacctggcagcagggctgcgacactccgccacggcgcctccggcgtcaggccccgtccgtgcagccgctgaggaagagaaacttacccgtcgcttcttgtcatcctccatcacctcctcgtcctcgcccagagtggccacctgagtcggagacagcgcggcctccttcatcgccttctctcgttggctgttccttgacgcgggatcgatcggcgtccttcggcagtccatgagagagagggaggatgaggnngaggaagagtttgtggaattgttgggggagaaggctccggacgagaggggtgcaaaggtgagagagggaaggggcggaaggatggggtccacagcagcngaaccaaccacaatttgtttctgg

SEQ ID NO: 5104 - DNA, 531 bp, Musa acuminata
  misc_feature (499)..(499): n = any nucleotide
tataagatgcaattaattccagtagcacacagcaatcacagtccacaggaagccacttcactgtcgctatgttatgcctcatcattgaaccaaagctcatcaaccacaaacaaccaaccgactttatttaatgaccactcaaacacgacatatcgttctccatctttcacgcacgctactatcactataattattgtccatctcatctgccagggagctacacggcggtgacggcaatcttcatgccggcctggcagtggccggggaagctgcagataaagtagttcgttcctcgggccagcgtgatgcggtcgttcccggaagtgaagaccctcgagcctgtcggagccgagcaacccctgtagccgggccgcgctcaccgcgaccacgttgtgaaccgaaggattgtacctgaaaacgagcacgtcgccgggcctgaagctcttcccactgggccagccgacaacgttgaaggtcagccgccgctgtcgccgacgangtacgtggcggatccgcgatctcgctgtggat

SEQ ID NO: 5105 - DNA, 620 bp, Musa acuminata
  misc_feature (5)..(5): n = any nucleotide
  misc_feature (10)..(10): n = any nucleotide
  misc_feature (22)..(22): n = any nucleotide
gatgncctanaaaattgaggtntcaatagatacagattatccaacagcatttcaacataggctaaagaatggcttggttgtttgaacatccagcacttttaattaggatgaaagaaagcattggaaaacacattcttttgattctgcatccttgataacagaagtgagaattattacactgccaaggatctaaagtctatgagatttgatctcgattatagttgaaaccagatgagatctaggggcattttgctttgtaggcatcccaaccctgggcccggtattctctggcagcttcagcaggatttgtagcctttataattccacggccaactatgatgatatcgctgcctctgtcatggattacagaataaggagtgttgtactgctggcctaatgaatctcccccagaaaccatttgaactcctggtgttgcatgaatgaatgctggatttgctggccccccttgccatgatgctggattgacagatatgaagccaatcacaaaatctgaatgttcttcagctattttcacagcagcagatgtgtaatctcctgtcgcaagatttccagctgagctcatttcagcaagcagcaggaggcccctaccttgacgcagc

SEQ ID NO: 5106 - DNA, 683 bp, Musa acuminata
gtacaaaatataataagagagctgaaaatgacaacagtatgtttacactatgcaagcacaaatctataatgaagaaaaatgtggaacatggataacactatgcaccagtctaagattaatcctgacagtatgtttatacaagtttcataaattaagcacttgacaagttacagggacagagtccctgtctctaggcctttagttttccactcatgccacgcttactgtgccaaacgccactgcgctccccattcagctgattccttcttgctgcaactgaacactgatcagcgcatgcaccattactacacatctcaatctgcgccttgcgccgcctcatccggttctccagcctaacacttctaagggcttgggccctctttgcaacctccaatgcctgtgaaaagttccaaattctaataataccttcctcaccaccacatatgatcctatctgcaccaatgtccacagagaaaagattgcaaccaaagccgtgtagcatcctttgaggtggctccactgcatctggagtggagtgcctgacctgagattgctgacttgaagtgcaagattgaccagacttcaacagcttcctcacattaattagggcgatcctcccatcacttgaagtgacacaacccatggaaactcaaaagcaagtgaatgaacagggctgtgtgtgg

SEQ ID NO: 5107 - DNA, 903 bp, Musa acuminata
  misc_feature (856)..(856): n = any nucleotide
  misc_feature (861)..(861): n = any nucleotide
tactttcaagaactcaaaagtcataatgttgatatggttctaaatgttattcttgtttcatccaagtatggagagtctcgaattcatcaattatgtaccttttaatacatatcacgttatcatatgcggctcacatgttcttgctcttccttatctcggttgatgaaatatccatgcgaaacttttccagtggtatggagatgaacatgtcattcaactcttgaggaatatcaagatcttcaagaaccttgaaaactccatcgaccaagcggccaccaactagaaatgtgcaacctgttcttttgcagccaagaagaatctccagcatttggctataacttccaccataatatttcggattaataagcctcacagcagtgtctgccccaatcacaaaggcacttccagggaaaatttctgctttcttatagaagtatggctggtttgagataatgacagttttccctgcctttctaaattgttctactcgacttttaatttcagccaaagacaatggtggtttgtcaggattgatcactgatatctcgaagcatggaaatccgttctcacagatgcttgatgcaatttctgagagtctcagatgtccatcatgcaatggattaaatgaacctgggcaatatcaccatcctctctgaagctgtgtccttatcaccagaaaaatcataaatcttcatgcaaagcttcccatcaataatttgttgtagctcctcatcctcatcaacttgcctttcatattcatcgggtacttcagattcatacaattctgaactaaaagtggcagaaactttgcaggcatctgaaattgcctttaataagaaatgactggaaaccctgncttcntcttctcgagtcgcaaaccccttcaacaaagtaacacttgat

SEQ ID NO: 5108 - DNA, 488 bp, Musa acuminata
  misc_feature (13)..(13): n = any nucleotide
  misc_feature (445)..(445): n = any nucleotide
aagatcagtcatntatccaagtaaaacaaaatgcatgagggataacagacctaaaccgtaaaagttgaaggcataaaccgccccccaacttattaagcaacatcttaagcagcaaaagattaaagatccccccggaccagcattagtttgaacttaatgcgattgtttaaacactcatcgggtagaataaacaagcctgatcagtacttgtagtccttgacatggaggctctcggagacaccttctcctccggcagcatcacccttgtacgtcccgagtgttgcctcggagttcgccttgcaccttgtgaggagagcggccctcgccttctggacgttctcctccttgccagcccacgccttgagcgtgctctgctgcagagcgcggccgaacgaaaaggacagcgaccatggtttcttccccttcagcttgttcattgcgttcnggttcagagtagctcctcttcgctctgccctcctgagaggaag

SEQ ID NO: 5109 - DNA, 541 bp, Musa acuminata
tatgatgtgtgtcaaaacttaaaataaagttgacaattaaggttcatgatgattcaactagttgagagatgatctaactgtggatgcttcagaatccagcttctcaaggatgatttcgtccgaagagcaaatcttctactcatggactctctcctcggtatccagaaatttagatatgacacacaaatcaccagacagatgcgacaaacatgatcatgtcttcaatggagccttcttctctctatcggatatgcgagaaggaccagttgtatgtgatttaaaccgacctctccccccttcctccttttccttcttcttcactatctggacaacgtcctcgtcatggagattgtgtgacagaccacaatgttgtgggtagtgccgtgcactagttccccaaacaagaacatattttaaatctttaattatgctacgatgtatatgattacagaagtcttccacagtgcatccacctctatcagtagaaaggacaaaaggatctgtaaaatcaggctgttgtcctgaggctttgaataaactc

SEQ ID NO: 5110 - DNA, 647 bp, Musa acuminata
  misc_feature (4)..(4): n = any nucleotide
  misc_feature (344)..(344): n = any nucleotide
  misc_feature (525)..(525): n = any nucleotide
  misc_feature (556)..(556): n = any nucleotide
  misc_feature (562)..(563): n = any nucleotide
  misc_feature (623)..(623): n = any nucleotide
tatntgtagtattttattatcattattcgacaacaggcgcatggccaagtcacagttccaacacacatcaataatctcacttttttttatgtttgcttgtttttggaataaaaaataaaaaagaagcgggggggttgtaaagagagaggaaaggagtgcttcaaaagtcgggacggctcggatggacggattccaggttcaaccggagaagccggtctggctccaaactgcgtcgcgaacccggctcatgtcgcggcctttgagcgtcctccccgcgccttccagcaccgacgtcgccaggcacctcccgtgcgccctggccaagtactcgtgcggcggcagcnactccccatccgcgtcttcctcctcccgctccggtgacggccctccagagcgggtccggagcgcccacggccaggccggcacgtccacgggagccgaagccgccgccgccaacaatgcggtgccgctcgtatggcggatggggggccggcgcccctgggtacgcgtcctccaatgccaggnagatcccgccgacgtgccgatcggcccagcngcgggnnccggtgagcccgtcccgggcggcccatatcgtggtggtcgccgtcgccaacggcgcgaanaaggccgggtgatcgtcggcggcg

SEQ ID NO: 5111 - DNA, 618 bp, Musa acuminata
  misc_feature (13)..(13): n = any nucleotide
ccgtgggcgtcancgagcaggttgtcatggaaaagcatgtgatcgatggacggatggttgaggcgaagaaagctgttcccaaggacgaccaacagatcctctatagaaacaacagcaacgtgcatgcttctcctggtaacggccgcactaagaagatttttgtgggaggcctgccatccaccattacagagggtgacttcaagaagtactttgatcagtttgggacagtcactgatgttgtggtgatgtatgatcacaacacccgtaggcccaggggatttggtttcatcacctacgactcagaggatgctgtggataaggtgctatttaaaagcttccatgagctgaatggcaagatggtagaggtcaagagagctgttcccagagaactctccccagggcctaacatgcgctcccctattggcggatataactccggtctgaatagagtgaacagctttctgaatggatatactcagggatacaatccaagcttgattggtggctacggaatgaggacggatagtcgattaggactttctagtagtgcaaggaatggtttctcttcatttgggtcctggctttggaatgaagatgaattttgaacctagtatgata

SEQ ID NO: 5112 - DNA, 648 bp, Musa acuminata
  misc_feature (14)..(14): n = any nucleotide
  misc_feature (44)..(44): n = any nucleotide
  misc_feature (344)..(344): n = any nucleotide
tgtatatatttttnttgttattttccattaaacaatcaatcacncaatacttccaattgttgacgaagaagaaagaaacatacacatacagttttaaaatgaaagaatatttcgggtatttatatttatttggccttgggactgcacgccgggttggaggcgaggctggtgagccacacctggtccgccacaaccgcctcgtcgtcgtcgttccggtgccacgtccacagcgcatgcatcccgttcgccatctctagccgcccgtgcccgaagctggcctccctgaactccgagaacgccggctgcggcttctgaaaactcttcgccagcccttccctgttgcngccgtcgcctatggtgatgtgcaccggcccgcaggcatccgccttgccgtcgtgcacgcgcgtgaaccgctcgtacgcgtgcacgtgccccgcgaacaccgcgtcgacgcgggcgccgtacagcagcgcctccatggccttccgcatctcctccccctctccctggtgcgcctcgttggagttgtaccacggggcgtggatcagcgccaccaaccacggcgtcctcgcaacggtcgacccggggcgaggtcggcgggcaagccactttgtactggggcggaatcgggggccgaagtcggtgtac

SEQ ID NO: 5113 - DNA, 569 bp, Musa acuminata
agcagaatgcagacatctcatatattatcagaatatgcaatcttcgtgaactaaaacagcaatcaggagtactgtgcttgaagaagaatgacaataacgtacttgggaacataaagactaccacacgagatgaaaagtcctttgaagtaaaatgtccaacaaacctctccagtggtggttctcgagtttaaacataagctttccttggagctacttccgcacaaatatttctgtcacctaaaatggctacaaacaatttgctgaaatttctcctcaacgagaaccagttggcccagggcagaaaaagtgtaccaggatcatggcttgaaaggtgcaaataccaccacagagttgtgccctccaaatccgaatgaatttgagatagcaatattaacttcatgctgctgctttttgttagcaactgtgtcaaactcaactgctggctcgggattaaattgatttatactaggatgcaaccatccagtagtgtggctttcactgttgcgatggcctctaaacctcctgctgctccaaggcgtgccctatcatagacttggttgcattcatct

SEQ ID NO: 5114 - DNA, 602 bp, Musa acuminata
atatattggtcattaagaacttgataaataaggttaatgtgcttaaacaacactagcggaagtaacacttaaaggaggaaattgcaactcatatttttgcagcaaagaagagatcctcatcggacacaattagctgatgaagaaaagctgcatgctctgtctcgaagcaatcccaccgttcatcaaggatcgatctcgatcatgatgagagaccgagggagtaggggaacccagttcgcctccagccagctcgaccccgcgatgaagctcccgggcgtgaactccgccgcctcggctgcacttgtgatcaccttgtaccccttccactgcacccggctgccggtcccggcgccagcccccgtgttccggtactcgccgtagtacaaggtgtcgagcgcgaacgtcccgctccactcgtgccacccttccggctccgatcacgtcgctgatctccgactccattatcaccgtcctcgcgtactccttccacggccggccgaggtaggtccggaacgacccctgcacgggcgcaaggttgggcgccgcgtgatgcgggaccggtggatgatatcccggtgggctcgttggggtcgtcgcgcccc

SEQ ID NO: 5115 - DNA, 591 bp, Musa acuminata
  misc_feature (4)..(4): n = any nucleotide
  misc_feature (6)..(6): n = any nucleotide
  misc_feature (20)..(20): n = any nucleotide
  misc_feature (521)..(521): n = any nucleotide
gttncntatatattatatanttctttattatcaataaatcagaagaggacatcacatatcaaatgtttcagtgggattgtaacaaaggcaatccctcaatcatctttcgtggggtaagaagccatcatgttgataccacagaggccttcgggcttccccgtgttcctcttcatccttatgtaacccctctccccccacctcgggccccacgagttcttcacgatgatgtaatcctgtccctcggatgagccatatcccaccgctgccaccccatgatccagttcacttccgcacggcccatcgaacactcccccactgtagaactggaagctcctgccggaagcttcaatggcgacgcttacaggttggtttgccagcgccttcaacaggctctcctcgctgttctccggcacatcctcgtagccactgatggtgaccatctcgagatcagcctctgctcctcgcaggtgcttcttccatgagataggggtagcatctcggtgtgcagcccaacagtggangcatgaacgagaaggataatcatcagccctccattgcagccgttgttttgggtgtcgaatcgatcaatgc

SEQ ID NO: 5116 - DNA, 557 bp, Musa acuminata
  misc_feature (142)..(163): n = any nucleotide
acgcggatgatatattacgggaatattctatttcgattgattgaagggagattttgagtccaagcagatcggatcgtcctaaccaatccacctgctacttcgactgctagagttcggagcgggaggaggaggggagcgtcannnnnnnnnnnnnnnnnnnnnnacggagatggttaaggaaaccgattactatgacgtgttaggtgtcagcccgtcggccacagaggccgagatcaagaaggcctattacacaaaggcaagacaggtgcatcctgataagaacccaaatgatccccgtgcagcccaaaattttcaggttttgggtgaggcataccaagtgctaagtgatccaacacaacgtgaagcttatgatgctaatggaaaatctggcatttccagggaagcaattattgaccctgcagcgatctttgcaatgctttttgggagtgaattatttgaggattatattggccaactagccatggcatcaatggcttcacttgataatttcactgaagggggaacaagtcgatgccagaaagttaccagaaaaaatg

SEQ ID NO: 5117 - DNA, 405 bp, Musa acuminata
cccgtttcttaatcgtaaatatttctgcaaaggccgggcaaataaaatccacatacagaacaaatttttctactttaaccagtccgttgattggctgccttcattctatctctagtaactttcatgaacctgtttccaatttcagtctgtggtcatcggttcggacatgcaacatctaaatcgagcctttcggacagtgcttacgatctccatctctgcagtctccagcatttctaacaacctctgtgaagggaggacgcacatcagggtttgcgtcccagcagcgggtcattatctcgccaagcaccggaaggcaatcatgcggtatgatcggtcggacacccttgttaacgacagcaaatgctgcctgcacagctgtcatgttctggaagggaagcataccag

SEQ ID NO: 5118 - DNA, 479 bp, Musa acuminata
tatacttatagacaaagcaaagacacaaacatagaatccaattgaaggttggtggacacagtaaaaccactcgttccttcacagagaagatgacagccttcaaccatggaagtagagaagaggtcgaacagcgcgatcttctaaaaccggatggaggacgcgtaggtgtcgccgaacttccaagtcgccggcgcgacatcgtaggcggtcttgaccttgccgtcgctggtctgcacccggaaggagaggctctgaccagtgaggtacgcgttgctctgccagttcatgccccagttcctgctcatggccatccactgcgtgtcggaccccttgatccagggcgccggagaccacgccgctccctcccacgttggcgatcagcaccagtcgaagtagttcttcccgttgatggtgaacctgatgcctccgctcctctgacacttgaccctgcggtagtagacgggaacgatgccgccccg

SEQ ID NO: 5119 - DNA, 586 bp, Musa acuminata
ttttaactttcttgcagcttacaataacaacatagtaaaaaaataataatgtggaatatgaggaaacctaagactgcaaatacacccaagaaaggcatgaccgtgtaagaaatctcagatgacttccaactttaaatttgtacaatactgctggtttcataatttgatagtctaaaaagttccgtagatccaagtcttccaagccgattggttctctcgcaaatcaaccaagctactgcagaagcgaacaatgatgcagccccacgtagccatttagcaaccaacaaaactgcaacaggatcaacctagcaagcagtagctgagaaacatttgaatgcaagagcttcaatagctaaagagattccattatcgcggagagctggcttcatgtctgtaccggagagccaaaattttgaaatgttctaatttcaccaccccagcctgcagtcacaatcgccaatccccaggctgacatactttgggctgtcgtgcctgcactgcaaaaatcaccattgcattgagggctctgtttattagctgtcatgagctcttcaggcaagttgcagaagccctatcgctaaccgtt

SEQ ID NO: 5120 - DNA, 593 bp, Musa acuminata
  misc_feature (293)..(293): n = any nucleotide
  misc_feature (297)..(297): n = any nucleotide
  misc_feature (323)..(323): n = any nucleotide
  misc_feature (330)..(330): n = any nucleotide
  misc_feature (335)..(335): n = any nucleotide
  misc_feature (339)..(339): n = any nucleotide
  misc_feature (352)..(352): n = any nucleotide
  misc_feature (356)..(356): n = any nucleotide
  misc_feature (376)..(376): n = any nucleotide
  misc_feature (396)..(396): n = any nucleotide
  misc_feature (433)..(433): n = any nucleotide
  misc_feature (535)..(535): n = any nucleotide
  misc_feature (573)..(578): n = any nucleotide
  misc_feature (582)..(582): n = any nucleotide
caatgcaatgacaacattgaactatagaattctctgtgacagaatcttcctcaactaggttagtcttagaacacttaagaagcaaaagaagtaaccttacctgccaattgctccccgagccctaatgcagcagcgagtttagccatgtctttcctggaagcatgctccagaacgagcttcttcaggaagccttcttcgaatcgtgatctcagaccaaacgccaccaccatctgcagaaatatttgcgcctctgaaccacccatggttcatccttctcatcctcctttctcctnctancatggcttccttctataatggccttntcgcggntggcnatcntctctctgctagngagncgcccgcccaggctaagctntcgccggcccatctacgccntgacgtgccccgacctggagagcagtcgtgcggtcgntcatggcgcaggtcgtcggccaggatccccggatgggcgcctccgtcattcgcatcttcttccatgactgcttcgtcaacggctgcgacgcgtccgtcctcntggatgacacaccgacgatgaggggcgagaagaacgcnnnnnngggnatggggccaaa

SEQ ID NO: 5121 - DNA, 1011 bp, Musa acuminata
  misc_feature (23)..(23): n = any nucleotide
  misc_feature (954)..(954): n = any nucleotide
  misc_feature (1006)..(1006): n = any nucleotide
tacacacatcatgcatttgatanttaagcaaaactacaatatatggagtacgtacacgtactggtaaaatgataacaccttatttggcacccacagattgtccttattatgactggggataaaggctttagcattaagcctccaccaactaaataatcgaagtggatacacacgagtacatggctgtcacaacgaagaagaacacgagatcatggctgcaactcaagcgcacaggtagccataggggaccttcttgccgcagtagttgaggaggagggtgagatcgacgtcgacgttgaggctgatgcccaagatgttggccttgatggcggtgcagaggcacaaggcggcttcgaagtcggcgaggccctcgatgaggctgcagcagggtttcttgggcggggtgacgatctggaggttgatgaggccgccgagcacgttggcgcaggcgcccagcttgaccgtgtcgatgggacaggaaggcatgccgggtttgggagtaggtttgggtctgggcgaaggcgggttacatcatggaggcggggacggcgatgtggaagaaggtggaggtgccagaagaatattccggcaacatccatgccggttgctgcctcgagatctaattacatgcacaagtcttcggtgccaccgtctccgctaccattcattccctgccaccagttttgttctcccttatctgaggacctgtacagctttttggtgcacagtggcgagtctatcttcgacatggaagtctccggcgctataagaaaagatgtggatgggggacgacgatgcaatccacatcctaaatggaggagacaacttgggatatctaagtattatccttgcaataatatatgatcccctgataaccttctcatcatcatgtcacttcaatcttttaatcgccggatgacttaactaaccatactcgttgtcatgagtgtgacnccttccctcatattttgactcagacatttaatggtattaagttaactaatantattt

SEQ ID NO: 5122 - DNA, 754 bp, Musa acuminata
  misc_feature (25)..(25): n = any nucleotide
  misc_feature (155)..(155): n = any nucleotide
  misc_feature (189)..(189): n = any nucleotide
  misc_feature (191)..(191): n = any nucleotide
  misc_feature (193)..(193): n = any nucleotide
  misc_feature (210)..(210): n = any nucleotide
  misc_feature (217)..(217): n = any nucleotide
  misc_feature (225)..(225): n = any nucleotide
  misc_feature (232)..(232): n = any nucleotide
  misc_feature (265)..(265): n = any nucleotide
  misc_feature (298)..(298): n = any nucleotide
  misc_feature (321)..(321): n = any nucleotide
  misc_feature (344)..(344): n = any nucleotide
  misc_feature (367)..(367): n = any nucleotide
  misc_feature (379)..(379): n = any nucleotide
  misc_feature (403)..(403): n = any nucleotide
  misc_feature (710)..(710): n = any nucleotide
gttgttgtcgtaccgggcggaggantccccttacagcactcatttggacgaatcttagaatggggagcttctggctgttgagggtggtgatccttccagcgcgcggattgaagtagtcagcacgcaagtggtgatccatccagagttcaactcangcaaaccatcagtttgagctcaacattttgttangncnaagtcttggcactgggntacatancttggagntaggctngagaagcagggcacctgctcaaacccctctgantagaaaggggtttggccaaaggtgatgcagttntccattagagctgagagggactntgaacccgagttttcatggcttncctccatgcttggcatggtgganatccttctgttnttgcagaagactctacatagggcncagtcttgaaaggcaactttggagcaccatcagatccttccatgcggaattcatgcatgacccactttgtcttcttccccttgggagctcttccttgatagaacgccaaagtcttcctcatcccaaccagcaatccttttcgggtcactggtttatccttccctgtggccttccagtagcctgacatggtcgcccggttggtccgctgcccggtcgcgtacttcagatctcgaaggctgaagaggtaccactcgttgctcccaacacatgcggcagcagggagatcccatggctcacacttgttganatcaacatccaccatcatcatggaaccgctctcggtgctgcctc

SEQ ID NO: 5123 - DNA, 463 bp, Musa acuminata
  misc_feature (5)..(5): n = any nucleotide
  misc_feature (19)..(19): n = any nucleotide
  misc_feature (22)..(22): n = any nucleotide
  misc_feature (41)..(41): n = any nucleotide
tccgnaataccaccaactngtntcatacaaacatcaaatcncagagagtggctttatgtagctacaaattcaaatcccaacacctctcacataagactacactgagaacagacatcttatggtgcatggacaaaagctggttatcattcatccaccaaaaaaaaacgaaaaaaaaacactatcaaaaggctaaagacatggcttctgcttatcaggtcctcaaaaaatagtatgctttctttctatctgctcactatgagaccgaatgccttgtgttccttgaatgagtagacttggcttcctcttgattgcctggagtcggggctctcggacatgtccgagctgctgttttcgctgccttgccctttgcttgaccacagcttgttcagtatcttcttcgacatcggaattcccttgactttgtcattggccttatcatcaccatggctattggacatcacca

SEQ ID NO: 5124 - DNA, 571 bp, Musa acuminata
  misc_feature (7)..(7): n = any nucleotide
  misc_feature (9)..(9): n = any nucleotide
  misc_feature (36)..(36): n = any nucleotide
  misc_feature (105)..(105): n = any nucleotide
  misc_feature (232)..(232): n = any nucleotide
  misc_feature (311)..(311): n = any nucleotide
  misc_feature (315)..(315): n = any nucleotide
  misc_feature (350)..(350): n = any nucleotide
  misc_feature (358)..(358): n = any nucleotide
  misc_feature (381)..(381): n = any nucleotide
  misc_feature (436)..(436): n = any nucleotide
  misc_feature (527)..(527): n = any nucleotide
  misc_feature (546)..(546): n = any nucleotide
  misc_feature (548)..(548): n = any nucleotide
  misc_feature (558)..(558): n = any nucleotide
aataccngnttcgaacaatgaggtacatccataatnaagatagattactgtttacatatctagaattctttcattagtgggatctgaaaagattcgagagaaacnaaggcattaaaatcttacaagtttcggcatactatcatccatcaaagaaagatgccttccactactttgattgccaaaccatgaactaatctccacaagactggttacagctcactataattgcgcnatactgcacggaactccttcgcggaatgtgttaagacgtgcttttaaattaggtgttcggaagcttgcatgaagcagtnttgnaagcagtccatgaccagtgcccaaagaattgtgangaggttgnaggaggtcaaccagaggatgcanctagctgctgagaatattaagacaaacacccagcgacgacatccacatatatganttgccctttttgcagatgaccgtgcacgaagaacaggcgtcataggtggctcaactttgcagccagatgtggagagaactgcctaacagtncttgtcactttctcagtgnancaaactgcanagctatcatttag

SEQ ID NO: 5125 - DNA, 596 bp, Musa acuminata
ctgcttcatcaaagtgctgagagtcacagctttgtgtttttattagaaataacgtcggagtccgatgcgatgatagttcacatccagaaagtaacaattattgaacatgcagatttcttaactagcttgtagcatgggaaaaaagctctgcaagttctaaagaaaggagaccctactggctgaggaatgacttactcccagctgcaattttagcagatgagttttcaacacctgtgctagcaacacatgttacagtggagatttgagtacgacgattctctccgatgcgcactacaggtttccttgtacgatgagacaccaattgctactgcattttgcataaacttgatggcaccttcacatgatgcggcatgatctttatatcatacggcacatgaagccattcgtcgagagaatgcgataggaaattctcaggcttacttgtatatacatctgcatattgatggatgtggtaggaaatgctgactcatgaccagtgtcagtgaggaatgttgcaccgaagaaactattgaacatactccgcattgtagatcgacaatgtgcctttccacattaagttcatctgccagtttgcg

SEQ ID NO: 5126 - DNA, 601 bp, Musa acuminata
taattcagttctttactcatatatgacactggggaacttctgctctgtaccacagtttttaaaaactccaactatcaattgtttcataacttgatgctctcttttctattcaggtgctctttgtgatgtatcattactttgcggccaaagaaatttataatgcaattcgtgtcttcattgctggttatgtgtggatgactggatttggtaacttctcttattactatgtccgtaaagatttcagcttcgcacggttttgtcaggtgatgatcacacacaagtcattcttcttttcttggcaattttactagcaattatgaaatggaagctgataacttctgtcatgttgaacagatgatgtggcggctgaatttttttgtggcattttgttgtattctcctcgataaccattatatgctgtattacatctgcccgatgcacagcatttttcaccctgatggtctactgttcgcttggaatttttaacaaacacaacaataagggatcagttattgctgtcaaaattgctgcctgttttgtggtgattgctgtgatatgggaggtaccacatgtctatgatatgtttggagccctttgcttt

SEQ ID NO: 5127 - DNA, 849 bp, Musa acuminata
  misc_feature (811)..(811): n = any nucleotide
  misc_feature (816)..(816): n = any nucleotide
  misc_feature (845)..(845): n = any nucleotide
atgaatttatcatttattacagtctataattagcatggaacattcctttgacaatcccactgcagaaacaccgaaaatttgaaccagaaatagctccaacatctatgatgcaacatgaaataagaacaacttcaggtatcgagacaccatggaacgaactatagttacaaatacaaacagtttaatcatgatatttttatggcgaactaaacaacatcgaggaacttaatgataatctaatgacgatataatgacgatacgatggttatgtgtgcagaactcttcaagtaggcatccggaaattatggaccggtgcggtaaaggccatcaaccatgaactgtccttccatgtataaggcggcagcattctgcggatggaagctatccatcacgacgaactgcatgtcctccgatggtttccaatgccgtttcctttggtttatgaaccaattattgatttgcttcggatcgaggcctgttgatttggccagggccaccttttctgtttccgatggatatggccacttgcagtgcagctcccaccagttgagtagtttttgccgggcttcctttggcagttttcctttcttcttcttcttggatagctcctgcctgagactgcccaagtacccaccgtacttctttagaaggtggtgcttcagctctttatcctcaccatgcgaatcgatcaagggaagatcgatgtctccaccaccgctagcgtctggatcttcttcagaggatgtgacaccttcgcatctctcatccgcagttcgaaggagaagagccgcggcgatgaagtgttggtganccgtngaactgtgattcgactctctttaggagtntgtg

SEQ ID NO: 5128 - DNA, 570 bp, Musa acuminata
  misc_feature (488)..(488): n = any nucleotide
  misc_feature (524)..(524): n = any nucleotide
  misc_feature (538)..(538): n = any nucleotide
  misc_feature (547)..(547): n = any nucleotide
  misc_feature (565)..(565): n = any nucleotide
gtgctttgttatcgtattaataaaaggtttagaaaagtcttatggtacatggatttttgtaaccaagcaccatgctgatttctcttatactttgttcccctacaatctgctcttcaaagatgatgtgttgttatgtcaactaagcagccagaaacttcatacaaataggaggattaacctttgctaaggctagcaatgatgaaggtagaatccatagtccatctccacagatcagaccagaggcgacagccggtcaccatcaaggccgccttcttcctattgagcttgtgccaggcaaacactaccaagctcccaacacacatgtcgattgcgaactggctccgactaggaaaggcactgccattgccatcggcagaggaacccaatgactgtacttagctggcaaaatatctctcatcgtgttcataaccactgcgaatccgaagaagccataacagagctgcaagcaatggtgaggaagtgtgagnaaccctcaacaccaagaattgccatgtttctgtatntcaaagcataaggngcttccaanttccatctggattcccantatcg

SEQ ID NO: 5129 - DNA, 512 bp, Musa acuminata
aatttctgataacacatgaaaacacataatggtgatcacagaatttcactgaacaacctcttgtgcgacaattgtaatactaataaggaagttcagcatattgagattgtttattatggtaaccaagtaaggatcaacatttgttggcatagcaatgaagaatttcatcatgaacactgtgatgccgatatgggcataatcctccaacatcatatgtacctggataacgttgaatttccagttacattgagcagttgcacccattgtcccagcagcatttccatggtatgcattcctgagtgatatgatatcatggcaaccagtataaagccgagcaatcattaatgccagctcatttgcttcagtaccagagtttgtgaaaaacacaaccttaagatccccaggcaactttgaagctaatgcctcagcaaaatccgcaatcgcatggtttagatataaaacagtagaatgttgcagccgttcatctgattaattatggcttcataacttca

SEQ ID NO: 5130 - DNA, 550 bp, Musa acuminata
  misc_feature (6)..(6): n = any nucleotide
  misc_feature (61)..(82): n = any nucleotide
  misc_feature (138)..(138): n = any nucleotide
ttaaanttttaatttcaagagacaataaagaaaagaagtacatatttaagagcttcttatnnnnnnnnnnnnnnnnnnnnnntgggtgtggctgtaccagtaacagctcaaagtataatacttatacgtatgactcanccgacgaggtcttcctccttgtgggtctcgatgacgacgtcggacgtggggtaggcgacgcaggtgagcacgaagccggcgccgatctggtcgtcgtcgaggaagctgccgtcggactggtccaccgaaccctgcaccaccttgccggcgcaggaggagcaggagccggcgtggcacgagtaggatagatcgatctccgcctcctccgctgcgtccaggatgtacacgtcgtcggggcattctatcaccttctctccctctggcgtcacaacttgaccttgtagacgggccatggcggtcacccggccccgcccggcgtccaccccgaagagggagcggcccagcttgggcagggcgcgcaggctcacgccgggcgctctgccgcagcgcgaaggggcgtgccgagggagag

SEQ ID NO: 5131 - DNA, 592 bp, Musa acuminata
accttctcaagtggaccgcacagaacagcagtttgcacacactacacacttgcagagaacagaaggtacctttgatggaaccaccaaatcttctctcaggactgtagcaatgaggaagaagaggagaaggtcccaaacaacagttcttgagccaccagcagccatgtctatagaccacaatataattgttctatggaaatttagactctctattatacatatcttacaactgatctgtgtctaagccatctccctgcagatcatcaagctttgggaaagagctggatgtgataaccatttgggaatcctaatcctggcgttcggactatatttcctcctctgattgccctccagctgtatttggtcaccaagcaatggaggaagatggccatctgcagcttggcgaattcagcgcccacacagaatctcatgccccctccaaaagccatgaaatgcttggacccaccattcagttctggcctctccttccatctacttgggtcgaaggtgagtggatcctcgtatatctcagggttcagatgcactgctggaggacacaccatgattcggccatcctgcaggaattgtgtat

SEQ ID NO: 5132 - DNA, 598 bp, Musa acuminata
  misc_feature (11)..(11): n = any nucleotide
  misc_feature (16)..(16): n = any nucleotide
aacacattaantgacnagaaatcctgaattattccaatcaaaacatagcaagagagaaaactcggttgttattagagcttgaacataatactgcaaggaagagaaactcaattgttcttagggcacaggacacggcttcgatattctccaagagcccagattggaaatatatttcgatatgctgaataactgatcatgcagtttctgttgaagacccccataatctcttgttggggaaactcgccattctccatctgcatatttattaaaacttttgctgctcgatgcaatggtttggatctctctcacactgcccagcatcaattagagttagcatagcccaaccagtattcactgcatgagttctgttgccctcaatattggtgtagaccttatcttgacatgaaaggtagctctctccccagccaccagaagccagttgtttagacaacaggaagttacatgcttttcggatgcaagagctgctctcatatgtccttccagcagcaactaatcccttcactccaaaccatatgccataggtgaagcaacaccccaagatccataccatgaaccatcagcttgctgaatctttcaa

SEQ ID NO: 5133 - DNA, 583 bp, Musa acuminata
  misc_feature (528)..(528): n = any nucleotide
ctttcttaaatatgcttggcaaacaaaattgccaaatagcatctacaaaaagctcaagttactctcatggtgctcacacacccaaactatgataaagcttgtgatacacaggccacataaataaacatggtggaagacaagaccacagggatcagaatcagatttaaaggtgaatatttttgtctgacatctcaaatggactctttgaaaagacgaggaagcacttcgtgtgcactgatatccaatgcctctgggttcctgcacaaaatccggcctttctccgtggagctaggaatgaaccataatttacgcaataaaggtgactcaaattgcacaaagaagccattactctggccaagcttccactttcttgaaccttgccctttccacacctgtggataggccataatgctctttggtgcaaccaagcaagcagccctggaaaatgagtcctctgcatactgccttaaaaataagaaacagttgctgtgtgtatggggagattcaaatgccttgtctatattgacnactggagcatacttatcagtctgagtcttctgcttatcaagaaggaaattaaccc

SEQ ID NO: 5134 - DNA, 666 bp, Musa acuminata
  misc_feature (7)..(7): n = any nucleotide
  misc_feature (12)..(12): n = any nucleotide
  misc_feature (17)..(17): n = any nucleotide
  misc_feature (628)..(628): n = any nucleotide
  misc_feature (637)..(637): n = any nucleotide
tcatggnatttnatcanaacttaagaatcatacatgagaaatccatcaatgggggattacaactatgagctctgttctttaatggcttctgcataacctttgtaaaaataacacatttttatctcgattcctacactcagtatgataagacttcgcgagtgattgaatccttcctctatgcttgccaagaccaccctcatcattaatctaagcaatgaaggttgctaatgacttctatcagaagcttacatcttcatgaaatctaatatgtataatcgagtggaacagttgatcaaacagccatggccgatggtgaccgataaccattcggatgtgatttctgccatctccatgcggttgagaggctcttttgaagatcggtgtaatgtgcggtccagttgagctccgaattgatttttgaagggtcactgtagacttcggcatagtcccctggtctacgttcaaggtagtcaactttgatgttcaccccagttgccttcttgcaggcctcgacaaattctttgactgaccttccttttccagtaccaacgttgtatatgccaactttgttaggccttgcttgtcaagagtttcacatgagcatcaacaaggtcagtgacatcgatanagtctctgntacaagttcatcacttgttgcgtagtctg

SEQ ID NO: 5135 - DNA, 568 bp, Musa acuminata
  misc_feature (4)..(4): n = any nucleotide
  misc_feature (519)..(519): n = any nucleotide
gccngctaagttattacacccttcacccactcgcacaagtcttatgacaagaatatcccgaaaaagaacaaattgtctgtctacatttgtgtaatctacaatccaaatgggagcgctatgggaaacaacagacagatagattgagttgagcattttacaacctctattgcacaacctggggaagacttggtagcaatgaaataggagagacagtgcttgaattttttttctgtactacctgcacaaagacacataagaaggccaaaagatcagcccttacaaagagtagaatcagctcagcttcagtccattatgtgtcccggaatatgggctgcgctgcccacttgaggtacaggttgatctttccagatttagccccttctaacggaaaactgtctctcacttccccttccattatgactctcgtcagcgtcatgatgcatcgacccatatagtcctttccaaatgtgtcgtgatcataaacttccaacataagcatatcatgtaaaccatcttcgncgacaaaatcaaaagtctgattccaggttggattcaagctttcatttac

SEQ ID NO: 5136 - DNA, 551 bp, Musa acuminata
tatcttttgtgatttcctcagactacaatgcatgtgtcctctcctggatcaccttcactccaccattgacgtcacacagacatatgagctaacactagtcgaccaaagtcaacgaaagagaggaagcgtcggggtggcagtcctctcaagcctctgtccctcaagagaggatggagtgcagatcgttaggtcgaggttgagatcaggcaacacagtggagctgcacttcttcatgttctcgtggcttgtcacggcatcagtcgacagagatgcactgtgtgagctccgagatcgacggagcggcgccttctgggtcaaccggtggttgtcaggatcgacacccatgctcttgagcttcttcctcaggtgggagttccagtagttcttcacctcgttgtccgttctccccggcagcctcccagctatcaacgaccaccggttgccgagcaacgcgtggagttgatgatgaggtcggttcatcctctttaaagttgcttctcttcacgtccggacgaaggtagttgatccaccggagcctgcaactctcgccg

SEQ ID NO: 5137 - DNA, 464 bp, Musa acuminata
attttatatccctttaccagaaaagcctgcagataactggcaaataaaggatggcaagaaaaatatttcctggtgcatatttccagtacaaagcaaaacacttatttgcatgcgttggtccgcatctttacgttacaaactcatctcccaatgaaagactgcagtgtgtagaactagaaattattcctcaagcaaatcaactttagtccggtaaaaaaggaaagccgaaatcaaaactaggcagtttaacatcaggctcttccgttttagtagggctccacaggtgctcggaactttgctcccgcatagacggctgcagcaccaagctcctcctcgatcctcagcaactggttgtacttagcaaggcgctcagagcggcacggagctccagtcttgatttggcccgtagctaaaccaaccgagaggtcagcaataaaagtatcttccgtctcaccactccggtg

SEQ ID NO: 5138 - DNA, 574 bp, Musa acuminata
  misc_feature (9)..(9): n = any nucleotide
tcttttatnccttactctgtaattgacaggtattcggaacgaaaactaaggcgagtacagaacaagagaacagaaagagcagctcagattgaaatagcacatcattttgtgacatcatcatatctccaaagaaagaagaatcgcatctggtccgattcggagttagattttgggttgcttcgttaatcttctcttgccttttgctgccaattcctgtagtaagaaagattacccactctgcagatcagagccccagtaagatgtagtacaccagcgtgattggcagcgcaatcagcatcccaaatatcaccgctgtgctgaggatatcgggatgcaaattgtactccttcgcaaacacgaaagggacgatgccttgcgggagtgacgcctgcacgatggcgatgcggaggaggacgccgcggagacccacggaaatggaggcggcggccatgacagctgggcctgttaggaatctcacggccatggcaaaagctgccaccgaattcccacatgctatgatcctcggctgcaggccatgaacagccccaggtgaacatggccattccgaggctgc

SEQ ID NO: 5139 - DNA, 557 bp, Musa acuminata
  misc_feature (4)..(5): n = any nucleotide
  misc_feature (15)..(15): n = any nucleotide
aacnntataccacanattgaacttccatgctatcaggtttatacacacaattatacagaaacatccatctccatacttgtagtaacactacatgttggattacaaagctcgaagttgaagaaacaaccaggtttccgggaaaactgctgggatggttacgaatctgttcaacagcatagtccataaagaaagctaataggtactgctgaagactaatgaaaaaaaaagggaagcaaccagatttccgaaaggtgaattggacacaataatgatagatgggtgctagttcttgggtatatttttcccgacaatcttggcaggcgtaattcggagaaggttgcccggctttccaggaacagccccttttatcatgaccactcgcaattcgctgtctattttgacaatcttcagctttcggattttggtcttggttcctcccatccttccgggcatcttctttcccttgtacacacgtccaggagtagtaccagcaccaatcgaacccagggctctgtgactcttggaaccatgagtcatcagtccacgacggaagttgt

SEQ ID NO: 5140 - DNA, 485 bp, Musa acuminata
  misc_feature (4)..(4): n = any nucleotide
  misc_feature (17)..(17): n = any nucleotide
  misc_feature (174)..(203): n = any nucleotide
agcnggaagatggattntcacaaacaaaagtttgtggatacaaaacaaacaggtacatttaccaaataaataccatttcactttatcttactttcgttcctcaacacgattgttgatcttcatggaggtcgactgccgtctttgtccttctgttctccatgaacccatgagctnnnnnnnnnnnnnnnnnnnnnnnnnnnnnngttcgtatactgagactgagatgagaagtccaagaagtgctgtgaagaccctaaagcagaagttgttggcgtctgacaggacaccggcgtgaaggtgccgccgacgtagagccccgaagctacattctgcaagtcttcatccctactctggaggagttgagcgtactgcagcaggtcggggtacgaggtcgcaggcagctgtagcggtactcggggtggctgcctctcggggacccctgggctgacgaggaagccgaggtcggtccggcttggactctctcg

SEQ ID NO: 5141 - DNA, 385 bp, Musa acuminata
  misc_feature (196)..(233): n = any nucleotide
ttagattagttaatcaaatacaatacaatcaatagattatgtgttctttagatcaacgtggacttcattattgatagcaaacatatgggcttcgcgaagaaaccatttgcattgcatcgaccgaaacgtcgatagcgaggcaatccaaacaccgacaacgtataagacacagtccatcccatttggacgcatctgnnnnnnnnnnnnnnnnnnnnnnnnnnnnnnnnnnnnnngataacagcgcttagttcaccacgctgcagaccttcctgacctccccggcggagcagtgagggggctgatgtcgcccatcttcaccatggcagccgcgaagtcggcgaagaaagccgcctggtccttgctgtacgccaccaccgtggcgtcg

SEQ ID NO: 5142 - DNA, 772 bp, Musa acuminata
  misc_feature (80)..(80): n = any nucleotide
  misc_feature (140)..(140): n = any nucleotide
  misc_feature (187)..(187): n = any nucleotide
  misc_feature (194)..(194): n = any nucleotide
  misc_feature (207)..(207): n = any nucleotide
  misc_feature (211)..(211): n = any nucleotide
  misc_feature (220)..(220): n = any nucleotide
  misc_feature (710)..(710): n = any nucleotide
  misc_feature (713)..(713): n = any nucleotide
  misc_feature (748)..(748): n = any nucleotide
  misc_feature (753)..(753): n = any nucleotide
agctcttcaagaagtaatacattcatgatccatgttttcatgctcaaggaaatgagattcaactcggctacatatctggngttctgacaggagagtagttgtgtggtgaatccattttgagtagcaatttcttctatccntgagagatatataagcagcataaggttcctactgaggtagctcacanatatccnggtgtataagtancagntagcatacncaaggttcttggtacaaacctcacacaaaaaagatataatttgttttcgatcggcgtgatgatctaataataagtgtacacctaaatacacacaatatgtgatgtttgacgtaccttataatagtccatgtatcacccatactaaaaaccagaacaagtgacagtgcagctctggaggatgaaaggctagagtatcattacttggccggttttgcctgactggcaacagacatggatcgcaaacgacctgcaatttgagtgaaggatggcctttgtgctggatcaggggcccagcacagctccattagctttctccactccggatcacatgtagctgggcactgggggctcagtgtattattcacgatacctcctataatgggcaccataatgcatgttggcataaggctcttcacccgtgagaatttcccacataacaatgccaaagagaaaacatccactttttcagacaacttgttgctgcttccanttngtaattctggagccatccatgtagcgtgctctganaccancagaaacagagtgtttcgt

SEQ ID NO: 5143 - DNA, 570 bp, Musa acuminata
  misc_feature (5)..(5): n = any nucleotide
  misc_feature (7)..(7): n = any nucleotide
  misc_feature (12)..(12): n = any nucleotide
  misc_feature (27)..(27): n = any nucleotide
  misc_feature (29)..(29): n = any nucleotide
acatngnagtgntaagatttatgttananttatagtcacaaaaatactgagtcacaaaaatactattaaaactagcagattgacacagactatctgcaattagagaactgtctgtggtaattgaaatgaagcaactgttcaatccagagggatgacataggcaagaaacacttaaatcagacaccacaacaaatgtacaggttggagtttcatgaatgatggtaccctgcagttatttggaactcaagaagccctcttgcttttgtacctattagcacaggcaacatatatcaaaagattcaagaagctcagccccgtgagcagccagaagtagtagtcgaggtgcccttcgttcaagttatcgggaatccatcctgtcctcccgcctcgagttgttaccgatgtcacgacagtcaagatgaagggactcaggtagttccccagcgcagtggtaagaagtgataacgcgctgcacagacttctcatagcatcaggagactgatcatagaagaactccagtgacccaatgatgtgaatacttccgtgctccgaccaaaagtttgaggtgtc

SEQ ID NO: 5144 - DNA, 462 bp, Musa acuminata
gcaacattcgatgggttcaaaaatatgccacgccgatgcaaacatacattcgatgagctaccgtctaaaagaactcaaagtctacatacttgcctccacacttcacatctgcccctacaatccttttgctactagttctgaatccttctgcgactccaaattttggtggcagctcaaccacctcgaccggccgtggcacctcaggcggcatactgcatcgaataagtgcccagttcacgccttcaaagaagggatgctgctttatctcggtggctccccgtttcatgcccagacgatgctgaggatccttcgccaggagccctcttatcaaatcttggcttgcgttactggttgatggagtttccgggaatctaagtgctggcctatcacattgaacaatgtcgcccggttgcctgagcccttgaaaggcgtccggccataaagaagctcatgcaggaatat

SEQ ID NO: 5145 - DNA, 547 bp, Musa acuminata
  misc_feature (96)..(96): n = any nucleotide
  misc_feature (384)..(384): n = any nucleotide
  misc_feature (481)..(481): n = any nucleotide
  misc_feature (524)..(524): n = any nucleotide
  misc_feature (532)..(532): n = any nucleotide
cttgatataaattaacagttcacaaatgtactccctatggaaaaactaaatacagggctgagaaggaaacctggctatgttggttggcagattagntagcattgccaaaggggtttaagagaaggggctatacacaaaatggatgtctcctacatgaaatagctcaatgctttcttcttcctcgatcctccttcgccatagagctcattccattgttgaagctcactcatatttgaagattcagatgacacactcgcacacacctgttcattatgcatatttaaagtcttccatgttcagaggacgaacatcctcacttgcatataatgtgggtaaaggtctaccttctgctatggctaaattcttttccttcttttctttctncaaaatctctctaatgggacaatgtgcagcagttacacagagattcttcaagtcacttcctgaatatccatcagtcatatttgcaaagacttcaagntcaacacctggtgccaactcttcttttgacaatataactctgngaatcttntctctgtttaatgca

SEQ ID NO: 5146 - DNA, 340 bp, Musa acuminata
tccctctactgcgctatgttgcagatccaaagacattatggacttggtatgagccatacatcaaggatgatgaggaattctctcctggttctaatggtcgacttacgacaatgggggtatttgtgcgtgatcttcttcttggtcaggttagttatttgatttcctttattgcctgtccttcatagagtatgcctgtcagacaattctttatgagtgtgttattatttaactgatttagtatttcttgctcatatttttgaatcaacaaattccattcatggtctttatctaattacttgttttggtagctgaaaggttagatcgcgagcggccgctcgcg

SEQ ID NO: 5147 - DNA, 480 bp, Musa acuminata
  misc_feature (6)..(6): n = any nucleotide
  misc_feature (377)..(377): n = any nucleotide
  misc_feature (425)..(425): n = any nucleotide
  misc_feature (452)..(452): n = any nucleotide
  misc_feature (466)..(466): n = any nucleotide
acatgntaaatgtcaaagctaaacaaaagttgctgatatttgctaaatccaaaacaaactagtagaaaaacataattttgttacaaaccaaccacaggttcacaatcagaacaacaaaagtcgcagatttagtaaagcatgcatatctgctaacactatgaattcatccaatggaaatggaaggatcactccttggaggacttgttaatgagtgacttgtgaatgtgagggatgactccaccaccagcaatagtgcccttgatgagggtgtcgagctcctcatcccctcgaatggctagctgaagatggcgtggagtaatacgcttcaccttaagatccttgctcgcattccctgcaagctccaatacttcagctgncagatactccaatattgctgccgagtacacagctgccgtggcaccaanacgaccattagcttgaatcctcgactncagttgccgatganttctgccgacaggg

SEQ ID NO: 5148 - DNA, 604 bp, Musa acuminata
  misc_feature (8)..(9): n = any nucleotide
  misc_feature (473)..(473): n = any nucleotide
aagatcanncagtacttctgtcactttaaagacttacagaactggatgcttgcaacatcatcattctgatacattaagactactgcagcaaccttaatttactactacaagctcctgttactgttagcgaggagattaacgacaatggacgaggggtgatccgatgaatcatgatgattacagcaacaatctctagacaccatatagatctgcccactccatcatcatgtagttggtgaaatcgtactcgtttatgcagatgagttcagcttcttctcgctgccattggaggctcgcagctgagaagcacgagctcgggctgccatcgccgctctcgccgttgccgccagaagctccattcatgccggagggagcttccttacctcctcctctgcttccgagagcttctcctttagcttcgacacctcgttctcgaggtggcacttctcgaggacgacagcgtcgtgcgccanttgagctcgacgtaggcctccttcacctgcttgcttttgtgccgcgcccgccggttctggaaccagacggccacctgcttggcgtcgagcccgagcttggcggcgaggtgggcttctcctggcctcaattt

SEQ ID NO: 5149 - DNA, 492 bp, Musa acuminata
  misc_feature (486)..(486): n = any nucleotide
  misc_feature (488)..(488): n = any nucleotide
ggcctttcaagaatctattcagatatcaaatcaccccacaccacatgaaaatacaagtgttttatgttcataatcactgttctttcactttacatgatctttatttttagcaaaaaggtttctctgaactccactaactacccccggtttggtgcagcatagcatcaatctcatcaccatcttccatctcaagttcttctggggtttgttccccgcgcagcctgcggccgtcaaacaggaatgcaatcgaattgatatccaccgactggcgatcacagtaggcattcatgagcttccgcagctgagtgctgtgcttaatcctgaagaagacctcatttccatcctgccccttgaccttgaggttgatgtgcgcggcctgatccgccggcttcttctcctcctcctgacccgacatccttctccctcggctccgcgacctcgatcgagcaaagcagggtgaaggatgtcggggcaggaggaggagangnaaga

SEQ ID NO: 5150 - DNA, 623 bp, Musa acuminata
tagtttcagaaaaaggtataagcagacttcatgtaaaactgacgcaacaataatagttcaaaaataagagggcatggcccatgacatacggccaatagcaaccccaacagttcaaatttgacattcaatgaaactaaagcgagaacgagataccattgagacaacatcaaggacggccgaacttaatccacctcctcaatcttgggacctgcaccactggcaccagcagagggtgcgtcatcatccattccaccacccatgtcagcaccggcaccctgatacatcttggcgatgatggggttgcaaatgctctccagctccttcatcttgtcttcgaactcgtcagcttctgccaactgattgccgtcgagccactggattgcctgatcaatggcatcctcgatcttcttcttatcggcagctgcaagcttggatgcaatcttatcatccttgatggtgtttctcatgttgtaagagtagttctccagagcattcttagcctccaccttcttcttgtgctcctcgtcctccgacttgtacttctccgcttcttgcaccatcttctcgatgtcctccttgctgagcctacccttgtcattggtgatggtgatcttgttcttctg

SEQ ID NO: 5151 - DNA, 563 bp, Musa acuminata
ttccgaactattatacattcagatcatgccatgagagctcagtttgatcttttagggtcttcaaatacaacatgaaggagaaggattgttattcttagttctcataaacatattacacatctcagtttggattggaggtgggggtgctgtcaacccatagcatacttctgcgtccatgctcgagctgtctcttcgtattgagacctctgcatcttgtacgtgtgggcgatctcagggacgagaggatcgtcaggattggggtctgtaagaagggaggagatggagaggaggacctttgatatcgtcagtgcagggctccactgctccttgaggatgtcgaggcagatgcttccgttcgagttgatattggggtgataaacctttgtctggaagttgacttttggaggcttaaatggatagtcaggtggaaaatgtatcttaacaaagaacactccacctgcataaggactgtctgcaggacccatgattgttgcctgccattggaagagatcttccccaacaggtccagcactgcatgatgttggaggatccctctgcaatcc

SEQ ID NO: 5152 - DNA, 553 bp, Musa acuminata
  misc_feature (114)..(114): n = any nucleotide
  misc_feature (389)..(389): n = any nucleotide
  misc_feature (417)..(417): n = any nucleotide
  misc_feature (420)..(420): n = any nucleotide
  misc_feature (433)..(433): n = any nucleotide
  misc_feature (443)..(443): n = any nucleotide
  misc_feature (445)..(445): n = any nucleotide
atccttcatgcagtttatatcacaacaaataagacaaattaatgcaagaacatcatcatctgcttacacacatatatcatgtgccatctctgatttttaattagttgatatggngaagaacagaaaagagttttctctacatctcactctcatctatccagggaacttatggccacccagtcatagacggtggggcttctcggctcggcggtctccaccccctcggccaccggcgtcggcttcctccggagcctcttccagtctcccctcggcgtcggaggggaaagaggggaatcaagggcgctccacgggccccgaggcgacgaggcggcagaagacgtcggtgagggcggtgcggcggaggcgctgccccggaggatggtgatgcnccgagtgactgaagagcgacgggagctnctnctgctgcggcggnggcaacaaananttaggaaggggagaaggaggaggacttccggagcttgccgaggccggtgtccggtggcggcccggcgacggtgtcgtcccacaggtggtggagaagactcattcttcc

SEQ ID NO: 5153 - DNA, 612 bp, Musa acuminata
  misc_feature (5)..(5): n = any nucleotide
  misc_feature (14)..(14): n = any nucleotide
  misc_feature (590)..(590): n = any nucleotide
gaaanaacaagaantgattgaactttactaagagtttgcaaccacggtaatcaagacgagtcgttagatcaaaatccgaacaacgcaggagaatttgatgtccagatcacctcttaggctacggaactaaccgacaggatcaagcggtgagcacgacggcgccgcctgcggcctttatcttcttctctgcgatcttggagatgagcttggccttcacgacgacggagcggcccgggggcagcatccccttgccgaggaccttgaagtatccgaactgggttacgtcgatgaggggggcggcggcggcgtccttagcggcagcgttccttgacggcgtcggggacgagggaccagaggcggtcgacgttgagggcggggcagtggaacttgttgcgtaggcggtggaagtagcgcataccgacctttccgaagtaaccagggtggtacttgtcgaacaggatgcggtggtggtgcatgcctccggcgttgccgcggccaccggggtgcttccggtgcttcccgatgcgtccgtgtccggcgctcacgtgccccctcttcttccggttcttcttgaagcgggtctcatggcngtggacggcggttcttagtctc

SEQ ID NO: 5154 - DNA, 573 bp, Musa acuminata
  misc_feature (41)..(41): n = any nucleotide
  misc_feature (120)..(120): n = any nucleotide
  misc_feature (284)..(304): n = any nucleotide
  misc_feature (490)..(490): n = any nucleotide
  misc_feature (512)..(512): n = any nucleotide
  misc_feature (518)..(518): n = any nucleotide
  misc_feature (533)..(533): n = any nucleotide
  misc_feature (535)..(535): n = any nucleotide
  misc_feature (538)..(538): n = any nucleotide
  misc_feature (543)..(543): n = any nucleotide
  misc_feature (553)..(553): n = any nucleotide
ccaaatattacatcgtgcacaaaatataattagggcaagcnatcatcggttgaagtaatgcatgctgatgctgcgcaacttattctcgacaagcatacgtactacgatacaatgaaagtnacacacaacgcagttcatcgtgggaatccttcatgggtgtccaccgccaccagctcctccaccgtagccgccgcctgacccaccaccgccaccgtaaccgcctccagcgccgcctccatacccaccgccagcgccagttcctcctccgtagcctccgccttgtnnnnnnnnnnnnnnnnnnnnntagcctcctcctccacccccaccatacccaccgccgccaccatacccagctccaccaccatatccacctccgtacccggcgccgccaccatacccacctccaccaccataaccacctccgccaccgtatccacctcctccgccggagccacccccatggccacgacctttgtggaaccagctcttntcctccaaaggcgtttgtagcnagtttnctggcaccggcgganantanagggngccaaagagnaggaggaggaagagttggcc

SEQ ID NO: 5155 - DNA, 539 bp, Musa acuminata
attctgtaatagcaaatgtctcaattgcatgaactgagaattctaaactagaagtgatataagagagcagatcacagtaaaccaataaaattgtacttctacacaaaggaggagttcagcttcttgagattgcacaagttcctgatgctcatgtgaacgaattcaagtcaattgaaaagtttaagatcttcaatactaacaatctatgggtgaacttgaaggccattaagcgacttgttgaagctgatgcacttaaaatggagattattccaaaccctaaggaagtagatggtgtaaaagttcttcaactggaaactgcagctggagcagcaattcgattctttgaccatgcaattgggattaatgttcctcgatctcggtttcttccagtgaaggcaacctcagatttgctgctagtacagtctgatctgtatatgttggttgatggttttgttattcgcaataaagctagaacaaatccctcaaatccttcaattgaacttgggcctgaatttaagaaggttgccaacttccttagt

SEQ ID NO: 5156 - DNA, 460 bp, Musa acuminata
  misc_feature (30)..(30): n = any nucleotide
  misc_feature (32)..(33): n = any nucleotide
tcatgaaatagataaagcacatggttgggnanngaaatcaactcaattgttcataagcactcatccccatagaaaacattgcatgcaaacccctcgacgataagagtcgttgcatgctcaaggttgaggtgatgtatcaaaatcacattctatcttcccttctccgtggagcgcaagtgataatctcgtcaaccctcaatatcatctcagctgcctcggttgccgacaaaagaacagcttgcttcaccttgaaggcctctgatatccctagtttgtccatatctccaacaccaccagatatgatgtcaattcctgcgttagttgtgtccttgtgatgctcagctcgaagttgagagataagctcagcactgtccaaaccagcattgtcagcaatgattgtaggtattgcttggagtgatcgcgagaaagcctcaatggcatgagatttcttccctggagt

SEQ ID NO: 5157 - DNA, 532 bp, Musa acuminata
aacatcacttggataaaagataaatcaaacaaaaaaactgcgatatccaaagcacatgtaccatcgtctttagcacttgacctccttcaatccataggcaaaatacaaaaacgtcggatcagtggcgccatccttgtaataagcaaacaccatgctgccatcctcatgcatactttcaccaacaaaaaactgtagatctttgagctttgaaagcaagaacttggtggctccttcaatgtgtttcttaaacaactcttgcttctcttcatcaagtttaggtgtcagtagcttgatatagcgtttcatataggtcacaaattgcttcttatcaaaggctggttgttcctgaagcctaaatgtgtcgactatgtcaaccactttaacagctgaatcatcgactccctcgtcttcaccgccttcagcagaagggtttgctccgatgtctacatcaatagctcctttaacaacccactttccttggacttcccacaacgtcccattttcaatttccttacaatgaaatgaatcggac

SEQ ID NO: 5158 - DNA, 586 bp, Musa acuminata
  misc_feature (10)..(10): n = any nucleotide
gcaatatttnttattcatctcaaaaaggcatcatcgtatggttcatgttcatgatgctcaacagtattttattggtttcttaccacccgggtgcatgcttctgtcaccaacacattactatgcttattgttccacgcacaagtactagtctgatttcttagaaaaaccaggatttacacttgggaacccgcaagccgtctcctgcttgcgtttgaaactgccacctgaccaagcttgtcagtcgtttctgataccatccgctctctgaccggagtataatgacgaaaccattcaccggtgtaaacctgttgaggtctcataatctttgtatcaggatcatcaagtgattcccgccagtgtgctaggtaaccagccatacgagggattgcaaacagaacaggaaagaactctgtcggaaatcccactgccctatagattaagcctgaataaaaatcaacatttggataaagcttcctcttgataaaataatcatcagatagagcagctttctccagtgccacagctacctcaatcaaaggatcccgcccaacaatcgagaaaacttcctcagccaacttgcggatga

SEQ ID NO: 5159 - DNA, 529 bp, Musa acuminata
atgtctgcatttatgaaaggaattcgatccaccgaacacattattgatgttaaagacacatgatacatagatcagactaacagagatccaaccattacagtcacagcttctccctgaatgcatacacgctgagtctcctccacaagttgaaggtccaatcttccacctcttggagaagccatgtaagcgatgaggtttgttttccccagctttttgctccagtagggggctagagcacaatgtgcgcttccacaaacaggatcctcatttattccaaactttgggcagaagaaacgagtaaaaatgtcatattcagatcctggaggggcaggtgcagttacaataaggcctcttccagcacacttctgtatctcatcaaagtttggatgtaaatcaacgacttcctttcctgaagaaagttctacaatgagatcatgactggtctctgttttctgaacgttgactatcgatgcaccatttagtgtctccgtaattgatggcatctctgcagcattgcatcctcccactg

SEQ ID NO: 5160 - DNA, 610 bp, Musa acuminata
cccatattgcttctcattcactgaatgctttatttttcacacaatctatagttgtgttcgtctgatcaatgatacgtcaatcatcatgcagcgtatttcctcgagccaagagtctcagagatggcccttaacgaagtcgatgagaagctggttcacttgctccgggaactgctcctgcacaaaatggcttccttcggggacgtagacgatctccagatcagggacgaattgcttcaccgtgccgctcctgacgtagtcctccatggccggaaacctgagaacgtagtctttttctcccatgatcagcagcgcagggacttcaactttcggatcggctggggccgttaccttgagcagcgaccggtatggcatatggagcggaaatcgaaaccccgaggtctcgtatagagcagcatagacatcgacgtcttcctcggtgcaccactgcggcaagggcgtggatgagtcggcaaggtccatgatctcctggcctctctcggctatgggaatctcaaccctggagaatagaatatagatggtgcgaacgactctcctgacatcgaaccggcgaagtctgcctccgctcgactggctccgcaccgcagtatgt

SEQ ID NO: 5161 - DNA, 589 bp, Musa acuminata
  misc_feature (16)..(16): n = any nucleotide
aagacattttcaatangtgcccgtttcaacacaagtcaatgaatttgaaacttctagttgtgcatccaagcaagtttttggacggatcgacattattcgtccatcagttccgaagtctatctcctgaagggaattcataaaaacaagaaaaagagtgtaaccagatgaggcactagaatgaaattacaagattaggcaatgagaaaacccccgagcttcgcgtcaatcaagatgccatcggatgtgcggcgatgtactcgacggcgagggggcaggaaacgatctggtcggcctccttgtcggggatctccagcttgaactcctcctccagagccatcacaatctccacattgtccaagctatccagccccagatccgtctggaaatgcacgtccggtgtcaccttggcgggatcgaccttggggaagctcttgacgacgtcgaggacccgatcgaccacctcctcacgggtgagatggtcgtcgccgtgggacgacatcgatcgaatcgaggtctgaaaggcatgagagggatctcaaccggtctagggttcggatcgggacgcggacgtgaccaaaggatcgcccct

SEQ ID NO: 5162 - DNA, 584 bp, Musa acuminata
  misc_feature (580)..(580): n = any nucleotide
taaaacaacatgtcagacgatgcttacatgtccaataccaccaatgtgtaaaaccttacatgagtcatcttcctctttctgataaaagagtttcgaacaaaatctttaacaatgtgccacaacaaagaaaaatccaagaatggaagtgttgtcaaggagggggctttacttccacttgtagcttcccgtcgtagaaaccaagaaactgatgctgtagatctttccatgtggggatcaaaaagaagcaacttggaaaaacagcaaaaagcaatttaggcatgtttacctgacctctgctgcatgatccttaaagagaccctactggtaataacttgacgactgcagcaatgggcattcctaagaacccaaggaaaacagttacaaaccactgtgacattgtaagtggtatcgtgtttgcaaagtccccaagaaattggacaattataaattgaaagacgacggtgctgatgagaacggccagaaagacatagttctgcaagatgccccggaatacatttatcttctccatctctctagagcttatctcattgaacacctgacagaaaacaaacgaattgantgtg

SEQ ID NO: 5163 - DNA, 524 bp, Musa acuminata
attttcacagtaattatgcaattatttaagaacgttaagtgtaagaaggcatgacaatgcatattccaagaacatggttctacatgacaaagatattaatggatactcttgtgaaccctagcaatacaatcacaaaacaagatatgaatgcttgacgacaataaagcagatactactgttactcctcgcaaacctccatctgagacctcatgcaatggattgaagagctctatcaaaattatcttcggcggatgccatacgagcaacgagaacatggtctggatgtgacaacttcaactgattgagatatcgtgatgatggtttgcctaggtgaagactgcacacagcaaggttggccagagtttctgcatcctttgcatctttgttcagtgcttcaagcaacaaggactcagcctcatcaaagcgacccatgtgcatacaacagacggccttgccattcaaaatcattccagtcatctgatacttttcagagaagtcttggaaaataagatatgctcctgtat

SEQ ID NO: 5164 - DNA, 523 bp, Musa acuminata
  misc_feature (3)..(5): n = any nucleotide
  misc_feature (334)..(334): n = any nucleotide
  misc_feature (352)..(352): n = any nucleotide
  misc_feature (375)..(375): n = any nucleotide
  misc_feature (451)..(451): n = any nucleotide
  misc_feature (500)..(500): n = any nucleotide
atnnnctagcatcaaccttaacatttcaaatatcatatttacccttccaatgggttctcaggaaaaataaaatacattaaaaagcacgaagaaattaagaaacagctacatgtgagaatctaaatgtccttggcagctgcattaggattcccaagagctgcaatcaaagaaaacttgccgaatgagacaggttgaaatctcactttgcatggttccatactctatacgatgagaatgcattggagtcatgcatcttcctcatcaatcaagatcttcttgcacgcctcgtagcacatgaatgagatgcctgcagcaggcaccaacttcatgcaangtggccccaaccctttgnaaagacccccaaccccttccttntccagtatgctcaggagagcatgtagcatgttcttgtacacctacccaccaccaacagctccgacttgcatatgcntccgagcaacctcaagtgggaagtagcactgctcgatatgggctccagntgctgaaccaatcagaagtgtgg

SEQ ID NO: 5165 - DNA, 698 bp, Musa acuminata
  misc_feature (4)..(4): n = any nucleotide
  misc_feature (635)..(635): n = any nucleotide
cacncgtacatgaaggttgcacgtctataatcattcgtacaaataaaagtgcagtgacaaattattgaggatgtagtgtgagttaacaaacaacaagactctcatccgaggagagtcatttgaataaattacattatgataacaaaaaagttgcagaaatatactacggcgagcacactcgtcatgtgtttcttactccgctcgagattgaccagcccgagaagaaagaataatgccaacgataagaccatagagcgcgagagcttccgcaaagatgagaataagaatcatacctacgaagagctttgggctgctgcgcgttggcccttactccagcatcgcccacgatgccgatcgccatcccagccgaaagtcctgcaaggccacaagccaacccagacgagaggtgcgcgtacccgtcaaagagatagtacgacttggccttggggttgatcccggtactgatgatcaccgcaatgatgagaccatagatcccaagcactccagccatgacgacgggcacgatcgacttcatcaccagctccgggcgcatcacacccatggacgccacaaccgacgccgctcttcgccgtcccgtacgccgcccccatgcaggagaaaacgagggccgcggnagcgccgagggaacccgaagaagggggcagtttcgtcgccgctgaacgtcgacatctttgcgg

SEQ ID NO: 5166 - DNA, 449 bp, Musa acuminata
  misc_feature (4)..(4): n = any nucleotide
tcantgttttcaagataaaattaaattcatctgacaggtctttgccccagacgatgagtttcgcacagggaatggtatccgccggttggtccagaaacagaaaaatttacatgcataatcatggtcactgctaagaaagtaggaaagacgggtactctcactgtgtaagcaacttggagtcacaagcaacaatcttcactctcttcacttgttccaggcggtcctcacttttgaaaactgcatcttgcaagatgaatgtccacacattgtcacaaaacctgtaggtgtgcagatgacccttgacagaaaccttgctcttcacttgggtctccaaggcctctgtcatagacttatcaaactgcacaagcacttgataagctagctctgggctcaaagttccagtagataccatctcatctaaggtttccgtcaagcacatgccaatggag

SEQ ID NO: 5167 - DNA, 603 bp, Musa acuminata
ctccttttggacccaaggcccgcctagcgggccgatccgggcggaagacattgtcaggtggggagtttggctggggcggcacatctgttaaaagataacgcaggtgtcctaagatgagctcaacgagaacagaaatctcgtgtggaacaaaagggtaaaagctcgtttgattctgatttccagtacgaatacgaaccgtgaaagcgtggcctatcgatcctttagaccttcggaatttgaagctagaggtgtcagaaaagttaccacagggataactggcttgtggcagccaagcgttcatagcgacgttgctttttgatccttcgatgtcggctcttcctatcattgtgaagcagaattcaccaagtgttggattgttcacccaccaatagggaacgtgagctgggtttagaccgtcgtgagacaggttagttttaccctactgatgatcgtgccgcgatagtaattcaacctagtacgagaggaaccgttgattcacacaattggtcatcgcgcttggttgaaaagccagtggcgcgaagtaaccgtgtgtcggattatgactgaacgcctctaagtcagaatcctagctagcaaccggcg

SEQ ID NO: 5168 - DNA, 660 bp, Musa acuminata
agtaaaaatttgccccctacacccgtcgaacatgcaatccatatttaaacgtcaatcttgatccatccataaaaggattagagtcgcgcagaaacaacaaaacaacgagggaaacaaggattagagcgctatgctttcacatagaacacttgaatgttcaaagaactcctacgcagcagcaatcggaggcgtagtcagttcatcgaattgaggctttggctccaagtcgataaactggttggatttactagctagatgcgagatgctaactcttccttgccgtttgatgtagtcggcgactgctctcatttcctcaggtgaaatgtatatgtacttcccacggtcatccatgacaccggataatctccccatgctctccaatgtcattatccgattgatgcagtcctgcgttcgtaatttgaattctgctgcaaggtcctccagaggaacacatttctgtttcttgatgtattcaacaaaatttgcaagtaaaccctggttatcatctcgcgtctcaatctctgttgtaccttcagcatcaacagaaaattcccctttccacttttcaaactccaaagccgcagcttcctcatccttggcttctgagccatagttcttcttccatcaaacgctcttgtgttaagctcctcatcctttctc

SEQ ID NO: 5169 - DNA, 634 bp, Musa acuminata
tcatcattttgctctaataatccactttaggtttcacaattgaaacaacaaaatcactcgatctaacgaagcacacgtatccactaactgcaaatccatccaacgaaaatgacacagtcactctttcgaagacttgttaatgagggacttgtgaatgtgggggatgactccaccaccagcaatagtgcccttaatgagagtatcaagctcctcatctcctcgaatggctagctgaaggtggcgtggagtgatacgcttcaccttgagatccttgctcgcattcccagcaagctccaacacttctgctgtcaagtactccaatattgctgctgagtagacagctgcagttgctccaacccgaccatttgcttgaatcctcaacttcaattgccgatggatacggccaacaggaaactgcaaaccggctcgggcagaccgggataccggcttcttcttgtccttgtccttgttcgccgccgtcgtccttgacggacatgagtcccttgatcccaccgcagcggctgtggccgatcaccattatgttctccaccttgagatggagcacagcgtactcgatggcgggcccaactccggcgtacttaacctggtcatagggagggaccatgttggcgcg

SEQ ID NO: 5170 - DNA, 639 bp, Musa acuminata
ataaataccaggaggtacaagacaaatgtcagattaaaatgtcctaaggccgataacacatccccaacacagtcatatcacaaacgagagtgacgcatataagacagaatttagagcaagaaaataaaaacaatagcgagatattgatacggattcaggcaatcacggatcacttccacttcttgaacttgccaccaaacatgccgtgtttcccaccaaacatgccgtgcttgccaaattttccatgcttgaacttgccatggtgcttgaacttgccatggtggccaaagccatggtgcttgaacttgccatggtggcccaagccatggtgcattccatgtcccatctgatgatggccgtgagacaattggtgaaccccgtaagctgccgcagcagctgcagctccccccgccagcatcgctcccatgttagatccatgcccatgatgtgacggagccgatggaccaggataagcagcaggtggatatcccgaaggtgggtatccgcctgatggaggatatccaggataccctgatggtggatagccttgagggggatatccctgagaaggatgtccatgcggaggatatgcaccgggtgcgggaggatatcctgtggagggtatgcccgggtggtggg

SEQ ID NO: 5171 - DNA, 969 bp, Musa acuminata
  misc_feature (4)..(4): n = any nucleotide
  misc_feature (6)..(6): n = any nucleotide
  misc_feature (10)..(10): n = any nucleotide
  misc_feature (954)..(954): n = any nucleotide
ttcntncctnattcagttagggtatcacttaacttgcagacagaataacttcttgatttttgtacaaatttaacaatgcataagcatgcgtgatgagctacattgttcttcacaaattctgcagacagattatttttgcactcacattttcacagtcatcacacaaatccctgtattcacagaaagaatctatacttatatcaaacatgtgcatggtggctgggcaggatcaccatcaatctggcaagctctgggccgttttttagaattcattagaaagtgcagctgcattccagatccatgatttcttctggcaccagtaatgaacacaaaaggtgtttaaaagcctcaaaacggcactcacagatagcaccaaggtcggacactctgcagtgggatgtcgatttgtgttaaaaataatttatattatgatttcagcagagggatcttgacattccaaataatgttcggacagactcatctccttatttgctagtagagcccctgccttcttaagcatgcatcttctggatatgccgcatcctccacaacatgcttcagcatttccccatttccagaacaaagtcgagtggttaaggttggggataatggagcatatagacttcttgaggcattcctatcaaaatcttttgtcacgtgcaataaaatagtccctgagagaacaacaacgaagccacaaatctcagatatgatgcttccaagaccttgtccgtcccaatccttgaacattataacacttgctacaattgtaagtgtagtaaacatcacatagtatattggagacacaatggctgtattgaaggtatcaagagccttgttaagataattcatttgcgttatcacacatgtgaccactaccagcataaaataccatgtctgtggataaattaactgattcgtgccctcaaaagtcaacttcaaagatgtccctanttctttaacactcat

SEQ ID NO: 5172 - DNA, 588 bp, Musa acuminata
ctttaagaggacatacatacacaatccatcatgatcaacatggctttcttttgtccattttcaagtgaattttaaaccatttctttctcttcatcgggtccctacatttcttttcatcctttgacttcttttcctttgttggacactcttcttcgccattagagccattgaaggcactgctcatcttgctgctacttgaattctgttttaaaggaggaatgatggtgtaggaggcatgaatagcattcctttccttaagaagctcgtcaattgattgcatttcctgtgcatatctgcttgtcatctcggtgaatcgggctaacacctgtcaatctccacatatagagagccagacttgcatgaaagaaaggtcggcaagaacgtgtgagtaaaatagcaccatccaggagatgcatcacaaacctctctatattctgtctcaaacttggacagctcagcccttttggttaatatctttgcctccacatcctgaagcttttccttttctgctgaaaattgttcagcacacataacttctattgtgtagcttacacttttgaagaagttgtcaccatagacagcaaatgt

SEQ ID NO: 5173 - DNA, 665 bp, Musa acuminata
  misc_feature (620)..(620): n = any nucleotide
tgaagtggtatacattattcatcaaccaacaccagtattagttccctatagaaatatgaaaacattgttctttttctacaagaaagcaaaaacattcttcctaagataaaaggatgatcaaacgcacaaggtctggagagtcagcagtcctaccactcactacaccgcaacaagaaagtcttaagttcaacttcatgattgacaagcagcaaataagtttcgttagcttctacatccagtctgcccttacatcttggcatacaaattaatggttgatgaccctcctgctttacttgtctgcacattttgtatagattctatcatggcgacggtagaatcgccgcgctttatgatgctctcgagcaatccaaccttctctagtaatgatccgatattagagtccgcggaactcaccaccttatctgcggtcttcagagcagcacataactttagagttaaagctgtccatgagtggtcggtcccttttaatgactcgatcaactgatcgtagttctcctggaacactcggacgagatctcgagatggtgtgagaagatgaggagaaggagggagctcggcggaggagaggagatcggtctcttgtccgtccccatcgtggngtcaccgtcctcggcgacgtctctcagcagatcgccgtgagagca

SEQ ID NO: 5174 - DNA, 585 bp, Musa acuminata
  misc_feature (4)..(5): n = any nucleotide
  misc_feature (11)..(11): n = any nucleotide
  misc_feature (16)..(16): n = any nucleotide
  misc_feature (20)..(21): n = any nucleotide
  misc_feature (267)..(286): n = any nucleotide
ttanncaacanagatnaacnnacaaaactagttcaagtccacataatataagaagactacgacaagactcggttgagcacaaggcgttctaatccagatcttgacaataatagctacctagttacaaatgacacttcaattttcacaccagacctagcctgattcaagtgagctggctgcggccttgagatccacgtttcatcctagtgtccgtccatggtctgttctgcaactgtaatgaatccgtctttctcctaccactgatannnnnnnnnnnnnnnnnnnntagacatcctcctcctacttttcttcctatcgtagcgcctcatgtatcccatatcatcacaacagctatcaccccaattcctaacactacagcaaaccatcttacaaaaggcgtgtctgcagcaaccggtttctgtggcttatagcctttagcgagcaggtggtttatggatacgtatatgaagaccccagttgcgagtcccatggagatggcgtaaatccagtctgccacgcgggccttgcgtggttgcgtctattatgatgccaatcgccaccccgatgggggctggagattgcaaa

SEQ ID NO: 5175 - DNA, 581 bp, Musa acuminata
  misc_feature (59)..(59): n = any nucleotide
  misc_feature (149)..(149): n = any nucleotide
  misc_feature (267)..(267): n = any nucleotide
  misc_feature (481)..(481): n = any nucleotide
gaaatcgtcaagtagaagaaaaagaacacaacttatcagtacaaatattgatggaagtntcggcctcactcgcattgctctcataacttgtatgtcttatatcactgaagtcaacagaatttaatacctccatagtccatataatggcnataaaattcgttttatgtgctttcagtcacagatatgttttacttcctaataagaagaaccacagtatgtgctgctatacttctgttttctccaagactgtcgaccttctcatgtgtntttgctttcaggttaacgactgaagggtgcgctccaagcagatcacacaaattagacctgatagcctccttatgagggcttacttttggcctttgtagaatcaaagtggcatccaagtttcccagctcataaccagcttcatgcatcagttttacagcttctctcacgaagaccgaagaggcggcggccttccacttgggatcagaatccgganagatctgaccaatatccggaagccccaaagcggccaaaatcgcatcgaccacgcagtaaggaacacatccccatcggagtgcgcctcgagccccggtcgt

SEQ ID NO: 5176 - DNA, 511 bp, Musa acuminata
  misc_feature (345)..(345): n = any nucleotide
ggtcctatacttttgctgaacttatgggaaacaagaaaagatggtaagcacgagaagacgtggtcggcgcacctactagcgacaataaacacgtttcaggattcagtatctataatcttgatcaaagatcgggtagttttcgctccaggatttagattctctttcagacttgcttattagcttttcaaatgcttctggtccattctcttcgatgtatctctcagcagctgataacaaatcatctggtttgtcgaaagtgtccttctttccggggacataccacacgtttactgtctgatggttcacaaataatggcctcacaaaatgttgataaacataagcggnaccattgaagtagggcaagaccaaccagcagctcaacatcaattttgcgtatgaccaaaagggaatccattctagtacttttgcaaaagtaagctcaaacagtgtgataaatgagtacaacacccattaagtgagccattgttggtcatcaacaggagatttggtt

SEQ ID NO: 5177 - DNA, 576 bp, Musa acuminata
ggaggaatgaaaatttcacacatcaaaaggcagtcgtcattttccagatttatgcataaaccacatagaccatacgatccttctagctttactttgacttctttccttgctttttcttcacgacttcatcaatgtacattatacccttgcccttgtaaacttagggaggtttgcagccacggacggcacctgcaaactggtgtactcgcgctttgtttatcccggtacaacaaattatgttgggtttgaagcagaaaactcgaacagcaggaggaacagcgaattccacctcatggctgtaacccagcttcagaaacagttgtcgaccttctgcttcagttcttgctttaaaccccacaccgacaatcttaagaaaccgaaaattttttgcctccattgacagattggaggatcaccatgtgacaaaatctacatattgtgcgatcaacatgatctgaagctgaatttgataacaacctaaaagatccagtccaaaacctaatatgcacatgctggttccatttctgataaccttcgaaaaggcaccaaagggagagatggaagagcgtgtacgcc

SEQ ID NO: 5178 - DNA, 570 bp, Musa acuminata
  misc_feature (5)..(5): n = any nucleotide
  misc_feature (17)..(18): n = any nucleotide
  misc_feature (31)..(31): n = any nucleotide
  misc_feature (548)..(548): n = any nucleotide
  misc_feature (553)..(553): n = any nucleotide
  misc_feature (563)..(563): n = any nucleotide
aacantaccctggattnnatctaagcatcanccatggatctccttctcaagtcacatttattgtcatggcatgcaccatgttcttatcccaagaacacagtgtattattcttggagttattgagtgatcttagtaagggcgctgccccacatagttgcccggaggtttgtagttgcagatgatgaagatggcgccgctgttgcagcgcacacggccgcagccgatggccgtggacgaacgccacacaacctgcgtgtagtggccgcacaccttgttaggggcgcacgtgttgctgttgtagtcgtagtactgcttctcggagacccaggcgttgacggcgtctgccgccgtgtagtcgaggccggagccccagaagatgttctcgccgtacggcccaccggagtgcacgagctggcagtcggccgcccgctggttggcgtagttctgggcgtacgcgcgacggtgttgtcccacgacacgggggcgacgccgacggggcgcgggcggcgttgtgggggctcacgaattcctggggcgagtttgggtangatanccggtgcatncatggca

SEQ ID NO: 5179 - DNA, 886 bp, Musa acuminata
  misc_feature (4)..(5): n = any nucleotide
  misc_feature (209)..(209): n = any nucleotide
  misc_feature (218)..(218): n = any nucleotide
aagnntaatagaaatgtataggaaaattggaaaagcagaattcaggtgtcccaattggttccccttggatgttaggaagttgctttcacgcattcttgacccaaatcctacttccaggatctcaattgcaaagattatgggaaatcctggtttagaaagggacttgatggagggattaataagaaatggcaaaggaacacaagaaattnatcaatccnataccaatgaggatattagttcccccggtaccaatgtgtccgaggacaggcgagagatggggaaacttgctaacttaaatgcttttgacatcatctctctttcagctggatttaatctttctggtctgttcgaggagaccaccacaagagagaagcaagattcatatcttgtcagccggcttctacgattatctcaaagttggaggatgttgcaaaatttttgaagttaaaagtgaagaagaaggatcatggggtgttgaaaatggaaggaacgacgaaagggagaaagggggttttggccattgatgcagagatcttcgaggttacgccagcgtttcatatggtcgagataaaaaagacaaatggagataccctggagtaccagaaaacgtggaaacaggacatcagaccagcccttaaggacattgtctgggcatggcaaggggagcagcagcagtcttaaccttgatgctaaagttgcaacattctgatgcaggaagcagatatgtgtttcgtgcttaagtaataccccccatattctatgtactcggtatttctatctttgttgtctatatgttgctatgctgttttctgaaactatgaaacttgtttaaactggtgctttgctgccgttgtgtgtaatcctcattgacttgttcgaatattat

SEQ ID NO: 5180 - DNA, 601 bp, Musa acuminata
  misc_feature (6)..(6): n = any nucleotide
  misc_feature (9)..(9): n = any nucleotide
  misc_feature (37)..(37): n = any nucleotide
  misc_feature (54)..(54): n = any nucleotide
  misc_feature (79)..(79): n = any nucleotide
  misc_feature (247)..(247): n = any nucleotide
  misc_feature (441)..(441): n = any nucleotide
  misc_feature (581)..(581): n = any nucleotide
tgccgnatnctacagataaaatgtaatgtgatacaantggatccaaaacttctntagcagccatcaaacattgatgcanatcatcacaagcagaagatatgaccaacttcagttaaaaattttgcaacccataccaaataagaagctataattttcagagttttaggaagagacaacatgaagaaagaaagccaaagtcattgtaaataaatcttaacatggatcaaatgcataaaatttctttttntctgcctgatgccttagccttaagagttccaaactcactgacaagttttcctgtgtccttcaatgatcccctcagtgctgacatatccaagtgttgatgactccagtgcctagaacaaggaaaacatgcttgaattgtgacctccaagactaagaactccattgctgctttcaagctgagggagggcgccactnttggcattgccgtcaccctccgcggtaatgtaatgtactcatttcttgaccgactcataaaccttgggctcccaaggaccagagatttccaaggtgtcaatccaaacagttttgatgggcatggaaactatagcatcggnttccgtgatcagagtgtgtt

SEQ ID NO: 5181 - DNA, 634 bp, Musa acuminata
cagcactaaaaagttttgataaagaaactaccatcggcataagagggtaagtgctaaaggatgaataaccataaaaaaacacgtcttcaaaagcagttcatcagtaactatagaaagagtcatataaaactaagtgcataatatggagccaaacaatggttcatctggaaactctagcagatacattattaagaccgaggcttctccttcttttccttgaatagggccaacagggacacaccagaaaccttcacaaccttaaaccttactccaggaatgtcacccacggcatggcccttccttccaaatccagcaatcaagacttcatcattttcttctataaaattcaagcaaccatcattaggaacaaaggctgcaattttcttcccattctttatcagctggactctagcacactttcggatagcggagttgggctgcttggcttcaatgcctatcttctcaagaacaatacccttggcatgcgaagaaccagcaaagggcttcttccactcgttgccgagatgacttttcttgtatgccttgtctgcccatctctgcctcctcctgtgagttttgagcttgcgcccagctcccataccacgagtcttccccatcttgtcgaacgttcgac

SEQ ID NO: 5182 - DNA, 633 bp, Musa acuminata
  misc_feature (606)..(606): n = any nucleotide
  misc_feature (611)..(611): n = any nucleotide
gctgtgatgatattatgcatcttattagttggttgcaccacttctattacatcactcaacagtattagcccaagagaaggctaataccttccatcactcttgacatcttatttgtattgtaggagactagtatatatatctatatgcgtggttgcctgcacgagggcggcttattagtggcgtcagtgatctcaagggcagaagacaaccctgtagttggtgccgccggggcaggtgaaggtgctcgtctgatcgtccttgggatagctgtaggcgtcggggcagtttctcttgaagaaccgggagtagtcggtcgggctgcagctgccggagttgcaacagtactggtccgtcttgaacacggtgcaggggttgttgcagccgcccggcgccttcagcgccccggggcactgcccgttgatgtccgccgcgcaccggatgccgcggcagccgcctgacgtggggctgaagtccattggcacgttgaagccgtcgaccagggagatgtcgaagaagtcgaggttgttgaactggttgagcgcgaactccgccagggtgttgggcgggttgccgtacgccgtgcatgacagcacgccgccgagtagnccgtntgcaccgccggtccgttccgtc

SEQ ID NO: 5183 - DNA, 617 bp, Musa acuminata
  misc_feature (50)..(50): n = any nucleotide
  misc_feature (83)..(83): n = any nucleotide
  misc_feature (93)..(93): n = any nucleotide
  misc_feature (101)..(101): n = any nucleotide
  misc_feature (503)..(503): n = any nucleotide
  misc_feature (510)..(510): n = any nucleotide
  misc_feature (541)..(541): n = any nucleotide
  misc_feature (605)..(605): n = any nucleotide
tcttagcacgagcagaataaggttactcttaaaaggtactgtcatagaanaaactcaggcattgcaaaataaaccaacatatnatagaaagtnataagtcnttttaagaaagcataacaaactaactcttcttagagcctttatctccctagaagatgatccaagactgaagaaaccaagtgtaagatatcatgctatcgctatctctggagccaccaccggtgatggcttgatgtattcttcttcgtcctttgggggatgaatggtgaccagatctggaagaggagtggtaggtccttgctttccctttggatcccagtccaacataatcttgaccttgattccaagaacaccctgtctaaggagaacatgcctcacagcagagtcaatatattcattgactggctgaccagaagaaatcatgtatccatccttgaacttcattgatttagcacgctgggccctaagttttccacttacaatcacctcacatccttttgcancactctncatgacaaacctcaagacaccatagcaggcnctcctcacagcaagacctccgagaagcttgtaacggagtgattcggctgagcatggcacacagnccctattgttca

SEQ ID NO: 5184 - DNA, 622 bp, Musa acuminata
  misc_feature (533)..(533): n = any nucleotide
tttgcaaagatgatagtaattggttaagtgcatagcaattattcgtcacaggagaacaatctcagcaactaaaccggatgatagaagcggctccgtcgtggaggttcttttgcggtggtgttactgagggtttggaggcctgctgttggctgctgaaaccctggagccccactcgagcaactctttgctggtatcatccttagtgcacgatgatctctatgaagcagaggcaatctttcttcgcccccatcgctgcctcgattgcctccttgagctcctcctcacacgtgacctttgcggtccagcaattgccctcgccgttgtggatggcatccaccagaccagtgtagttccagttcttgatgacattgtaaggcccatcatggatctcgacctcaatcgtgtacccgccattgtttatgaggaagatgatggtgttctggccgcacctcagcatcgtcgacacatcctgggctgtcacctgaaagttccatcgccgatgcaggcgatcacgcgtctagatcgcgggcggncgtctagaggatccaagttacgtacgcgtgatgcgacgtatagtcttctaagtgtactaaattcattcactggcgtcgtttacaagtgt

SEQ ID NO: 5185 - DNA, 600 bp, Musa acuminata
  misc_feature (403)..(403): n = any nucleotide
  misc_feature (406)..(406): n = any nucleotide
  misc_feature (468)..(468): n = any nucleotide
  misc_feature (477)..(477): n = any nucleotide
  misc_feature (483)..(483): n = any nucleotide
  misc_feature (489)..(489): n = any nucleotide
  misc_feature (545)..(545): n = any nucleotide
  misc_feature (586)..(586): n = any nucleotide
taatgcaatcacagagtctaacccgaaaacaacaagattattatccatcatccgaaacataggggcaatctaaagtttccatctcaaaatttggttggcactgattgttttgccctaagaacatcagctaaacattcgatcaaaggctaaaagcagatgaaagatgccttcttgcagataatgcacctaaatttttgtccagaacagcaactggtcactcaccttgagacttctggtagacgtatgtgaggccgcactttcggcagtagtggcggtcgaagtggttggccatgaaagtgccggcgccgcactcggcgttggggcactccttccgcagcctggtgaccttgccggtagcgtcgtcgaccttgtagaactggagcacggcgagcttgaccttctnctncttgtgcttgatcttcttgggcttggtgtaggtcttcttcttgcgttcttggcgccgccgcngaggcggangacgangtggangggtggactccttctggatgtttgtagtcggcgagggttcggccgtcctcgagctngcttcccggcgaagatgatgcgtgctggtccggcgggaatnccttccttgtcctg

SEQ ID NO: 5186 - DNA, 731 bp, Musa acuminata
  misc_feature (9)..(9): n = any nucleotide
  misc_feature (15)..(15): n = any nucleotide
  misc_feature (36)..(36): n = any nucleotide
  misc_feature (142)..(142): n = any nucleotide
  misc_feature (160)..(160): n = any nucleotide
  misc_feature (184)..(184): n = any nucleotide
  misc_feature (189)..(189): n = any nucleotide
  misc_feature (417)..(440): n = any nucleotide
  misc_feature (665)..(665): n = any nucleotide
acctcatcntttatngcatcatcatccatcattaangcagaactaaaaaaatgacgaaaacagactgttccaaccgcataaaactaagtccaatttcaaatatttaactttgtgttcagtaatctcatgcctggtttaagantatgtgactactgaacanaaagttaaatatttgaaattgganttagntttcagtagtcacatattcttaaaccaggcatgagattactcgatcactcaccttgcgccttctggtagacgtaggtgaggccgcacttgccgcagtagtggcggtcgaagtggttggccatgaaggttccggcaccgcactcggcgttggggcattccttgcggaggcgggtgaccttgccggttgcgtcgtcgaccttgtagaactggagcacggcgagcttgacnnnnnnnnnnnnnnnnnnnnnnnncttgggcttggtgtaggtcttcttcttgcgcttcttggcaccgccgcggaggcggaggacgaggtggagcgtggactccttctggatgttgtagtcggcgagggttcggccatcctccagctgctttccggcgaagatgagacgctgctgatccggcgggatgccctccttgtcctgaatcttggccttcacgttgtcaatcgtgtccgacgattccacctcganggtgatcgtcttccccgtcagcgtcttcacgaagatctgcatcttgtcgccccaggctgctaccgt

SEQ ID NO: 5187 - DNA, 622 bp, Musa acuminata
  misc_feature (14)..(14): n = any nucleotide
agtagtcgttgttngtcgtcatagtttccaactacatgagacatagagcactccctgcttagatcaacaaaaggttcgaaattaccccaaaaacatccaccatgaccgcttatgactccaaggatgagaaggacgtctggagagcgcggagagttcatcactcaaaggcccactggttctccctacgcacctcttcctcttcctcgggggtgaagtcgttcttgatgttgaaggttttacggatctcctccggtgtcttccccttgatcatgtcagctacggtttggcaagttaaatccagcagccctttaatattcagatagtttgcagccaggataaggtcgaagagggtagcctgatcgaccttgacgaactcggcatcccaggacttgagctcctcgtcggcgagcttggaagagtcatcagaggatttggaggcggcagcagcagaggcgtcgacgtgcttcctgcagtactcgatgaccttggcgaggatcttggaggtcacgttgggaagcgggatgccgttctcagcgcagtcgtcctcgatcatgtgcttgatcgtctgcgactccatggccaccgcctcatcgactcgaacacctcgccatcggagctcttt

SEQ ID NO: 5188 - DNA, 600 bp, Musa acuminata
  misc_feature (592)..(592): n = any nucleotide
tgggtgatcattcggtttccaatcttacatacaacacataaaagtcggacatcaaccacaaggttattaaccaagttcaaaactaaccctaatagatccaccaccacatgggaataaaagaagattaagatgtctgaaggactgcaataagccatcactcgaaagcccattgattctccctccgaacctcttcctcttcctcaggcgtgaagtcgttcttgatgttgaaggttttgcggatctcctctggggtcttgcccttgatcatgtcggccacagtctggcaagtcaaatccagcaggccctttatgtttagataatttgcagccaggatgagatcgaagagggtggcctgatcgaccttcacaaactcggcgtcccaggacttgagctcctcgtcggcgagcttggaggcgtcgtcgggggacttggaggaggcggcggcggaagcgtcgacgtgcttcttgcagtactcgatcaccttggcgaggatcttggaggtaacgttgggaagcgggatgccgttctcggcgcagtcatcctcgatcatgtgcttgatggtctgcgactccatggctaccgcctcgtcganctcgaaca

SEQ ID NO: 5189 - DNA, 649 bp, Musa acuminata
  misc_feature (6)..(6): n = any nucleotide
  misc_feature (22)..(22): n = any nucleotide
  misc_feature (446)..(471): n = any nucleotide
  misc_feature (594)..(594): n = any nucleotide
  misc_feature (640)..(640): n = any nucleotide
acaganatttagtagaatttcnagtcctccaacggagaagaaatcgtatttcatacactaaccaaagaaatcaaaaggaaaccctaaatcaacacatcatagtaaaaggaagcaagatctgagagcagtcatgaccaccaccagaaaccctagaggcggcgagcgctcaggaactggtgaacttggtcacggccttggtgccctcagacacggcgtgcttggcgagctcgccggggaggacgaggcggaccgaggtctggatctcgcgggaggtgatggtgggcttcttgttgtagcgggcgaggcgggcggcctcctgggccagcttctcgaagatgtcgttgatgaaggagttcatgatggacatggccttgctggaaatgccgatgtccgggtgcacctgcttcagcaccttgaagatgtagatcttgtacgtctcgctcccnnnnnnnnnnnnnnnnnnnnnnnnnncgatgggcggcgccgtccttggaaagaggtgcttcccggccttggggctgcttctccgccctcttctccttctcttccgccgcagcaggcttcttctccgccggcttcttctccgccctgggngccattagggaacagagcttgtcgttgcaacgagaaaagatcgacnggaacgctg

SEQ ID NO: 5190 - DNA, 661 bp, Musa acuminata
  misc_feature (26)..(26): n = any nucleotide
  misc_feature (46)..(46): n = any nucleotide
  misc_feature (48)..(48): n = any nucleotide
  misc_feature (51)..(51): n = any nucleotide
  misc_feature (590)..(590): n = any nucleotide
  misc_feature (656)..(656): n = any nucleotide
ataatttcaatattacagtacaacanaacacatgatggctcgattncngcntcccttcacgtaccgttacaccaccatttcagaccaatgctgccatgtaataacaagttgatcacacaatatatcgtcttcctcagccattttaaagtacaaaatccaaccatagtgtttcaaaattaattaatcgataaagcacaagtcaaaacatacagtactcattataaagcaagagtggattcataagcattctaatctaagctttgatggcatactttctcatcgggaagtacatctcctttttcttctcccgttctgtcttcaatgaatcctgatgcttggtgagacggcggcggatggcacgagtcttcttgggacgcagatcgagcgggatgaacttcttgttcttgtaggcctccctcagcgccgccttctgcttctgcgagatcacggtcagcacccgcgcgatcgacaccctaaccaccttaatcttggagagcttgttgggtgcgccaccggtgactttggcgacgcggaggagggaaagctcgttcttgaggtccttcagctgggcctggagctccgccttgggnttcccccgaagctcgtgaaccttaatcctcgccatcggtatagaatcggctcttccccctcgtcgntttct

SEQ ID NO: 5191 - DNA, 443 bp, Musa acuminata
  misc_feature (367)..(367): n = any nucleotide
tatatatttatttatatgacctttcacaaaagatcctgcaaagtataaaagcacaacagggttctgaaacacacgcactacaaacatgcacaaccatccatacagacagtcttattgtacgtatctgcctcctgtatatattttgcgtcgtcaacggaacaactcctccaggctgccgaagtagcctatcatggggtcgaaggcggaggcggaggcggaggcggaggggtagaaggcggacggcagtagtaatggctcccgcatcccctcgtatagggtgttccacggcgcgcgggcttaccgctagaggcatggtatataatctgcgctttcgcttccttcacaggggtcgtctcccctctcgctntgacgaggaagacgatgatgacgagtgtgaggaggagagaagcacgactcttgacgactgtcctcatcctatcgtc

SEQ ID NO: 5192 - DNA, 561 bp, Musa acuminata
  misc_feature (27)..(28): n = any nucleotide
  misc_feature (503)..(503): n = any nucleotide
atatgttgggccctatgaatcctcacnntccccttctccgagatccacctctccggcttgaactccaagcagtcttcgccccatatcccttccaacctcgccatggcgtggagtggaaccaagatctttgtgcctggtccaactccgtggccgcttgggaggacttcatgtcgcagagctgctttgagctcgaagggaaccggaggaaatagcctcagcgactcgcacaaggctgcatgcaagtacactaacttgcccaggtcctctgcgtcaaataccaccagatcatccgagctcgatctctcgtttcgtagagatgctaccttcttcaactcctcgaggatcttgaactccaccatggggttgttgcagagcagccaaaagaaccatgtgagccctgcaccagtcgtgtcccttccggcaagcatgaagttcatggttgtgtccctcaggaacttgtcgaacttgctcgattcttgttgactcatgtgttgttcttcgtngtcggtggtcatcgatgtaagacgacagcagatcgactttttcttcgcttcatgtatg

SEQ ID NO: 5193 - DNA, 482 bp, Musa acuminata
  misc_feature (5)..(5): n = any nucleotide
  misc_feature (354)..(354): n = any nucleotide
  misc_feature (381)..(381): n = any nucleotide
ttatngttgcaaatgaaaagaaaatatcaagcatacaaacacactgcatcctgttacagaacacacacccaagcacagatcgagtcttctcacacttcatcgtagctcccaagccctgcaagttgacgctcatgatacagcgtcgacgacatgagtccacagaagttctcctcatcgaacaccacagtcggagccaccagactattgtatgcctccaccgtgcagctcacggtgagactcgagagcatcgagctgggagactcagaagccgctgcggaggccaccgggggttcgtcggtggactcgtgtactagagaagcgctcaccgtgttcgtgtcggcgacgagggagtcncggccggtgagcttctgcacgagggcncggaacgtggcggcgctggtggtcaccctcatggggttggagatgtagaccaccttgatgggcttcttcttcctgacgatagtttggatagcttgaggcac

SEQ ID NO: 5194 - DNA, 569 bp, Musa acuminata
  misc_feature (485)..(485): n = any nucleotide
taatacactttgtcagatggaagtataaaataaaagaaggatcgatgagtgcttgactagttaactacagcaacagagtagacaagcatggagtcataaatgtaaatatggatttctcggaccatagtagaattctgtttcagatgaaggtagcatttgcataggccctaccactagcagttatcgagaaaccaagtttcaaggacttaactctttggttttgccattggaggaggagtgctggcagtagttcttactgccttcctttctttgaactgcaactcgggcacttgtattgctttatgctctcggcttttgcaggagttatcttcacgcacttgccatggaaccacctttcacatacatcacatgcaatccaaaactcatccgcactgtagcttccaccacaagctccacagagtgtttcgctgtgttcgtcgtcgtcttcaccgtaaccctcatcagctgttttcgagttgcttttnatctggccatcactggtgcgcttggttgccgttttagatttgcttccactgtccatgctagacttctctcttgattgtctccta

SEQ ID NO: 5195 - DNA, 639 bp, Musa acuminata
  misc_feature (7)..(7): n = any nucleotide
  misc_feature (9)..(10): n = any nucleotide
  misc_feature (39)..(39): n = any nucleotide
catgatngnncctacaagtgctcggttcagaggacttgnataaaagaaaacagttttgaacaagtacagaaataccaatagaagtaccaaaagcaggagtttctctttcgctacagaggcaaggcagtaaaaggagcaaaccatgtagtattctttcaagactgaagaatctccgttacatctcttacagggtcgcttgcataaaaatcagcgtgcaagaaaaacttacttggggccaatgtccttcagagcacagatctgttcttcacccattgcagacatcacagtaacaaccagatccttcccctcagcaaacccatccttgagctgcaatgcattcagatggcccaacattaaacaatgtcagactaaggggaagtatccctttcagaggcttttctatctgagcgagcaaattttcatcagttgggagtttcagatcatctttggtgttgccactctcagtcaaaagactcacaaaaccatcttcagatatgtcgatcagttgataatcagtgcgagtaacatgaggaacatcacagttgtgggaggatggcacgatatcctcaagtttttttgcattaaagatgtctatgggaacaaagtgacattttgcgtggcatgcttccagtcttggag

SEQ ID NO: 5196 - DNA, 578 bp, Musa acuminata
  misc_feature (18)..(18): n = any nucleotide
  misc_feature (178)..(202): n = any nucleotide
gcataacgtatgcaaaancctcggaaccaattaatccatctactctacatcacttttcagattaaaagctccagcccttggcaagtaaaaacccctgaaatggttcaaacacttaaagactgctcaacacgactctgtgagacctcactaaacttggacttgaaccaggaaatcctannnnnnnnnnnnnnnnnnnnnnnnnggaagaggctgggcagcggctgcagccagttctgcttcatgctgttgctgtgcagccaggtcaatctggacttctggaggtgcaagagcaggtgattcaacaaagtgaagatttgggtccccagcaagttttctagcaagatacaggaagggcttctcaaagttataattgctctttgcagagatctcatagtactggaggttcttctttctgtggaatgtaacttgcttagctttaacctgcctgttcttcacatcgaccttgttaccacagagaacaataggaatattctcgcagaccctgcacagatcccggtgccatgttgggacatttttgtatgttaacctggcagtaacatcgaacataataatggcac

SEQ ID NO: 5197 - DNA, 573 bp, Musa acuminata
  misc_feature (9)..(9): n = any nucleotide
ctaatttangagtttccaagataagttccaacatttgtgcattttattgcatgacaatggaaacatttcatgtacaaagaagatgcttctcaagaagtagcagaagtaatgggacactcagttttgagctgtttccttggagggcaaggcagacgacttgcagattgggcaccaattcttctgccgaagccattgatcaatgcaggcaacatgatatagatgctcgcatggcagcctgcccacctcctctccatctatataatcctcctgacatatgctgcatttggcatcatcattatcatgataagttattccagggaccagggaggcacatgcatatgtgattctcttgagacattttgtcatctgctcttctgtaagagctgtgctaacagtacccattttctcctccaaagctaatagttcctcgtaggacatattatcgatgtccattctcatgtctctgtgctgatcgtggaaccttagtgcccccaacaatacatttgtctcgagaaccaataattgctcatatgttaactcttcattgcgttcaatccgctctaatgccaatag

SEQ ID NO: 5198 - DNA, 612 bp, Musa acuminata
tctaattccttcgattcatttgtgtaataaacacagttttcggcaaatgagcaagcgttaagatttcagagcaagcattcaacaatagatcatgattagcaatttgatgagttctaagatcggagctaaacaactaaaagactacataaactaatataagacagggcatgaccacaaggttatcttttgcattcagctttacaacatttggcagccaggcaatgtcagaacaatcgtgaaaggtcgcagattctgtctttaaactcctccgtgaatggtaagcagtcgtctcctcaagcaaggttccgtatgtcccaagaatagagcccacctcgaatgacctcatatgtcaacatctccctcccttcctgggaggtgttcctggttttaacatattcccaaatccctttttcttatcagctggtttaagtatctgaaacgaacaggtcagagtgccatctacactcatcaaagcaccagcattatcaaattccccacaatagtttggggcagagaatattgtcaccagttggcgctttgcaaagaattcatagccatcttccacaacctggtgggcacgacagatgagatctagatcatgcttctgaagaa

SEQ ID NO: 5199 - DNA, 605 bp, Musa acuminata
  misc_feature (2)..(2): n = any nucleotide
  misc_feature (5)..(5): n = any nucleotide
anctntttgataatccaattgccagtactactttctcactgttgtacacctttggtcttcaatgcctctcatgacacctaatttggaaggtcaacatactacctatctaaaataataaaccaaatgaaactaccatgacttgaatggggaccatctaaaagcacccacataagcatgcaatagtcaactgtgtcaaccaagaaatcattcttgtcctgctacacaattacacaagaatcaacctcatgctcattcagtaagatcaaacctggaagttctgccactgatgtactgcatgcaaacttcttttgcagttctgtagccagtgaatcagcatccagtaggaaagtttccagacctgagaccctcgtaaccttcttgtttccttgtcgtcgttctgtcatgatctgaatgggtctagcagcacctttgcggacagcaacttcattcccttttgatactctatgatgaacttgcatcctgcttaaaaaagttgatcctagatccttcttgtggatttctgttgggtaagctgagccctttttaacagaccctttgtagagagcatcacacaatgtagcatccagaactaccattgccttatt

SEQ ID NO: 5200 - DNA, 599 bp, Musa acuminata
  misc_feature (11)..(11): n = any nucleotide
ataaaccacanaagaattataagagagctatcacatgtttatcataaacctctacaccaacataccaagaggagctatcaagtacacaaatgaacacggtgtttgtatatagtcatgcagttactaattaatgtctctcataatccagcttacaacactttattcatagtcatatgtactacaaatgtgtgcaagcaagagcgaaggttcagaggctgcgagcatgtgcaatttatgaaagccccaaaagcttcttgatatccttctcgatgctcagaggggatgtggttggggcatagcgatctaccacgcggccatccttgtccaccaagaacttggtgaagttccacttgatgccatccccaaaaatgccacctttgctcgacttcaagaacttatatatgggtgtggcattttgaccattcacatcgaccttgtcaaatatcggatattcagctttgaaacgagtgcaagcaaactcaacaatctcctcattgcttcctggttcttgcccagcaaattggttgcatggaaaagccagaatctcaaaatctttgtcctgtacttctcatatagctgagtcagttcctgtagtttga

SEQ ID NO: 5201 - DNA, 641 bp, Musa acuminata
  misc_feature (567)..(567): n = any nucleotide
  misc_feature (586)..(586): n = any nucleotide
  misc_feature (589)..(589): n = any nucleotide
  misc_feature (624)..(624): n = any nucleotide
  misc_feature (626)..(626): n = any nucleotide
ctcgaccatctacagaaaataatcatgttttcctgtatatcacaaaaagcaattgcctatttacatcaaatagttgttgaattttaccccagattctagtgctgctggggtaaaatttctaggcaattgcctatttacaacaaatacttggcaactgacagtatcctataccaacaagcctcacaaaatcctgaaatcgacctttcaacaatggtggctcaatctcagaagagcatgtaacagatctctcagaaaaatggatcttctgtaatgaagttgttcactgcaagttgacaaatggagttcagaacctttactcgctcagctttactctcgtgttgccaatgacagtcacattttgaagcctcatgaactcagatctcatgaagagtgcatatagtagttcattccatgtatctggaaccccaggtaagcaccagtggctgcagtcctgcctgtggagtggagaaggacccaacttgccaaggtaaaacaaggtaaatgtccgtctttccttcgggctgtcatctgtgtcacattcaacagattcagttctagaaccttggntgcagtagaattttccaanggnacattcctaaagtgggctcaagaaatgtgaccaangntttaaagtaaccgtg

SEQ ID NO: 5202 - DNA, 401 bp, Musa acuminata
  misc_feature (59)..(59): n = any nucleotide
tctatgctaataatcctccatgactacactctatacggagtttaaatgaaaaatcaganaactctgtaaggatcctccacaactacacacgctagaagacacttcatccattataaaacacgttatagaacattttactgttgtttgcactcggcgggccgatcaacttgctcccctccactcttcttctgccttgtagccgactttttcttggacttgccattctcttcttcatcttcatcttcatcatcctcatcctcatcatcttcatcttcatcttcatcctcttcatcttcaccatcctcatcatcctctatttctgcatcatcatcttgaacagcctcccccgtgaaccatgaaactgcatggggaattatcttgtctctaattgtggacccaat

SEQ ID NO: 5203 - DNA, 753 bp, Musa acuminata
tatcatatgggacaaagtttccttttttttttacaaaagaatcgacatgaagtaaatctcaaaacccttatcaacataattatttgcacaaacaacatcgaaaattagacatggcaactcaaactacatcttcgactcacgaacaatctatcgaaaatctaccaaacaatctgactaacaattcttttttttccttctttttgcaagatttttctatcacaaaatggtgaattgcaacttattcgatccgagcaatcagttcaatggtagaatactattggaggaaccttgaatccaaagtccttgaggaagggtattacctgcggctgctccaccaggtccctgtacaaggcgtactccgcctcgtaatcatgcaagtccagctccgccttctggttcgtgtggtaatggtgcttcgcctccgccgacttcccgaagccaaagacgctgacttggtcgcagatccccaaggccagcatcaccgcctgcatccccgacgagtagtggaacatcttctcgtcgtggaccttcgtccactcccccggcggcttccctgttgtgtccacgaacgtcttcagagagtagtacttcacgatccgggcgcagagcatgtcgaaccgcacgtccgtgatgaggagcggcgccttgtgggacgaattgcacacggcgtagtcgaggaaatggacgggttggcagatgtacatgacgatggggacgctcttcgccgtacggatgacagaagcagcccgggct

SEQ ID NO: 5204 - DNA, 557 bp, Musa acuminata
ctttattctttaaccacgtaatgacttcaaaacaaatgttgaccgaagataacaacacacgggcggttacggagtctcgttgactcgatccattgccccctcacttcttgggcgcaaggcggctcttgatatcctccacctccttggtgccgatctggaaggccttggcgaggacgtcgtcgggcaccgtcggggttgccgcgaagagggtggcagcgatggactgggtgccggggagctggctgttgaagccggcgatgacggcggcgggcactgcgccgttgttcttctggaagtggacgagcccacgggggaagacgaagacttcgcccttggtgatggtcttggctatcagcttgttggcggtggtgatgaagcccacgtcgagggtgccgtctaggacgaagacgatctcggtggcgcgcgggtgggtgtggggcgggttcaacccgccgggggcgtagtcgatgcgggacatggacacgcccagggtgttcagcccgggtatcttctcgacgttggcgccggttacgagggagcccatggtgttgttggtg

SEQ ID NO: 5205 - DNA, 677 bp, Musa acuminata
  misc_feature (321)..(340): n = any nucleotide
ttgataattaggtgattcacactctgaatcaaggaagaaagataggacacatagcatcctaatggcggaaagagaagtgacatcattaggctttgattgggagttatgctcatggcgggtgattggatgaactgatctcgagctccgaacaagaacatgtctcgatctcgctacttcttgggcgccaagcggctcttgatcttcttcacgtctctggtcccgatctggaaggccttggagaggacgatgtcgggcaccggctgggtggcggcgaagagggtggcggcgatggattgggtgcccgggaactggctgttgaannnnnnnnnnnnnnnnnnnngaacgtcgccgttgttcttctggaagtggaccaggccgcgggggaagacgaagacgtcgcccttggtgatggtcttggtgatcagcttgttggcggtggtgatgaagcccacgtcgagggtgccgtcgagcacgaagacgatctcggtggcgcgcgggtgggtgtgcggcgggttcaacccgccgggggcgtagtcgacgcgggacatggacacgcacagggtgttgagccccgggatcttctccaacgttggcggccgtaaccaggaacccatggtggtgttggtggcgcccggttggccagcccctggaagaaaaagttccgcctccgtcactcc

SEQ ID NO: 5206 - DNA, 553 bp, Musa acuminata
gttcgctttcggaggtttaaataaggggagataaaacagaagagatgaaaaccaacggctgtgatcgacaattctacgaaagactacaagtttacaatcacccacaagcgcggagatttccttcgacatctccatcaaaccaaagcagaaatgaggaagaagaggaaatcaagccctaatccaacgcgctatctctttcttccactaggcagagcgaggagggccggcgcctatccgccgaagccgtaaagggtgcggccctggcgcttgagggcgtagacgacgtccatggcggtgacggtcttgcggcgggcgtgctccgtgtaggtgacggcgtcgcggatgacgttctccaggaagatcttgagcacgccgcgggtctcctcgtagatgagccccgagatgcgcttcaccccaccccgccgggccagtcgccggatcgccggcttcgtgatcccctggatgttgtcccgcagcaccttccgatgccgcttcgccccgcccttccccaaacccttccctcccttcccgcgtcccgacatctctttctccc

SEQ ID NO: 5207 - DNA, 619 bp, Musa acuminata
  misc_feature (11)..(11): n = any nucleotide
  misc_feature (61)..(61): n = any nucleotide
  misc_feature (561)..(561): n = any nucleotide
tctatttattnatacattatttatactgtcttacattcttgatgagagatctactactggntgcaagatcttcacgtgcacattacaggagcgacgggacccattatacaacgaatagcacccactgaattgaatctcctatatcatcctatcaatacgagcgagttgcaccttagcagcgacttatcagtctcaacaactagtcccagtacttgatcatgccatcccatccacaagttgcaaccttgctctgctccaatggatgccactcacatccaatgcatactccttcatggcacttcaaagtcctaaagaccttgcaactcttccagtcccagaaccaacacttcccttctccatctcctgacaggacaaaccgcccatctggagaaaaattcacctggcaagcataccccgctacaatgtgccctgcaaacctcttcttcttattcagctgaaaccgctccttcgtgccatagataagtatctgattgtccaagatctgagcagcagcaatttgaattaggatgaagagagatcaaggcatggaatgcatgtgangtcactaatgtactttacacactgggattccaatttccaaacacgaggacttgtcatc

SEQ ID NO: 5208 - DNA, 612 bp, Musa acuminata
  misc_feature (6)..(6): n = any nucleotide
  misc_feature (536)..(536): n = any nucleotide
  misc_feature (605)..(605): n = any nucleotide
gcattnacctctgtgtttcacaaccaataaaacttacaaagactaaatgcaaacacacctttaccattagaagtcctaagcaaaaaacagaagaaaaaacaggaagaggaggtacctcagcacaagctataaaagcaaacaaaaaatgttttgtgacagtaatttgttccagtcaacaacatctttaagataaagaaattcttggcttttccacatcaaaaggcagcacgccgtggcctctcctcagcaacattaactcttagtgcccgaccatcgaaactctgtccatcaagagcagcaattgcatcatccatttcagactgtgctgccattttaacaaagccaaaaccacgtgaccgtccagtctctctatcatacaccacccttgcttccagcactttaccatgttcactaaaaatttgccctaggcggccatcatccacttgccaaggcaaattgccaacatagatccttaaagatggttgaaattgtcgaggtgttctttccacacgtctccctctgggagctgatttgtntacagtcaaaagcctgccactatttcagaacgatgcagcatcttccacagctttgtctgcttcttcaancgtgctc

SEQ ID NO: 5209 - DNA, 611 bp, Musa acuminata
  misc_feature (4)..(4): n = any nucleotide
  misc_feature (6)..(6): n = any nucleotide
agcnanatcatcatatcagataagggttacaatcttgttcgtaccagcaacaacactcacataatttacgaatttaaaaagcacacaagcatattcgtacttataaccaaattccagaagcagatttacgcataaaattaattgaaaaaggaacgtatcatcaccaagaaatcattcatgagattgggcgacgcaaaggaaaacccccattcacttagatcttgtcgatgtcctcatcctcgaactcgatgtaatcatcggcagcgccctcgtcctcctcgtcgaggcctccgatgccctcgttgagacgaatgttctcgggcagctcaccgtacgccttgaggagtcgggcctcgtcgggcatgtacttgaagatgacatcggccttatcgtcctggtagtcgcggaggccgaccaggataatgtccccggccgcgatccagaccttcttgtgcatcttgccacggatgtggcagagccgcttgctgccgtcgatgcacatggtctcgcagcggccgttgccgagcatccgaagcacctgagcgtactcctggccgtcctccttgaagaccagctcgcgcttctcgtcgtccgctcgttcttcctcgttg

SEQ ID NO: 5210 - DNA, 383 bp, Musa acuminata
  misc_feature (4)..(4): n = any nucleotide
  misc_feature (7)..(7): n = any nucleotide
  misc_feature (23)..(23): n = any nucleotide
gtcnatngttgagatccaacaanatacaatttttttcttagccaaatgcaacaaggtaataaggccacccaaagtgtgcagggcagaccgagaaacacgcaacccacaaactattctacgtgaacgcagacggccactgcttcatgctcctatacagcactggaagtagcccataaacttcttcctcccggtgggtgagccgtggtggtggtggatggggcggcgtaggtcgggctcgggaaggctgtggcgtggcgcctcctgctcctccttgttggtggtgccggatcggagctcgtcgtcgtttccgaggctggcgcgggaggtgttcttgttctgcttccgcatctcccggatcttggtgaagtccatggagtagtccg

SEQ ID NO: 5211 - DNA, 520 bp, Musa acuminata
  misc_feature (10)..(10): n = any nucleotide
  misc_feature (12)..(12): n = any nucleotide
  misc_feature (18)..(19): n = any nucleotide
  misc_feature (445)..(445): n = any nucleotide
  misc_feature (497)..(497): n = any nucleotide
tcataaattntncccagnntcgaagcctgtcatattagcataagtggcgtcgcatatcgtgacagtagtttattattgaaccgacgacaaacaccgaacacagagacatgaagtcgaacatcgacataagaacacttggaacagactcgaacccaatgcagaccaacagacacggatcactcgagactccaggacaatgcagcagcggcggcggcggatgagcagggcattagctcactggccaccacggaggcggagcacgaggtggagggtggactccttctgaatgttatagtcggccaaggtgcggccgtcttcgagctgcttaccagcgaagatgagcctctgctggtcgggggggatcccctccttgtcttggatcttggccttgacattgtcgatggtgtcggaggattcaacctctagggtgatggtcttgccagtnagggttttcacgaagatctgcatcttgggtgaggaaaaagggaactcgaaanttgttctagatcgcgagcggccg

SEQ ID NO: 5212 - DNA, 660 bp, Musa acuminata
  misc_feature (27)..(27): n = any nucleotide
aaaccctatcctagtcgtaatcattcntttgccaaggtaatctgcattaattacatcatcactgtgccagcttccttgttctaagcttctgatacagcaacagtaatctgttctttagctgctatagttcttgcaaacaagaagaagaagaatgatacagacatgcaacaaacacttggctaattcaccaccactacctcctccgtcttctgtttgatgaagaaaatgatctaaaagaactggtcttgatgaggaaagttgtcggagagaggagtggggtggcggcggcggcaggctagaagatgtcgaggatctcgaggatgtagccgttgcagagtgggcagctgccgcggttgacccaaagctcccgggagcacagccggcagaaggtgtggccgcaggggatgaaggccgcccccttgtgccgcaccatgcacacgcaacacacgtacattgtgccgctgccgacgtcctccagcgcccacttcgtcgtcctcctcggccacgaggggctgccgccagcgccgccgctgccggagaggaccctttcccctccgctgcttccacagcctgtccgtctgctccagcagggccatcagcgagaccctcgctggctgctgtcctccttcccagtcgccgcgtcggggtgccccaacgatc

SEQ ID NO: 5213 - DNA, 566 bp, Musa acuminata
  misc_feature (375)..(375): n = any nucleotide
aatgaatgaatattgatcaacagtgaaatgggaaatggacccaatacatcaacaagcccaaagtatctctatatgctcctccaagaaaagagttcttaaatttagagccatcaggagaagaaatttgctggaagcagcaatggaattcacatattgtcgagttcctctgtggatttcttgtattctggcttcagttcatgggttccttgatttggtcctctcttattatagacgcaaagatcatttagtatctctttcaggaattgctcaggttgatcagtctcttggaccagttgcttcagtgcccaattttgttgcctttcaaagagcttaaagatgatattctccaattcacgacggtccctacgtgttcgntttgcatccgatccttttgttggtgttagtttcttcttgtcctttgaacccgatggaaccagagcaaccataccgggcataggctcataagcactccatgatctttgtcaattactgcacttgtctagttttgatcatagctttgttagtctttcacgacataattaccatagtcactaaaattctcactg

SEQ ID NO: 5214 - DNA, 1265 bp, Musa acuminata
  misc_feature (10)..(10): n = any nucleotide
  misc_feature (778)..(778): n = any nucleotide
  misc_feature (813)..(813): n = any nucleotide
  misc_feature (819)..(819): n = any nucleotide
  misc_feature (827)..(827): n = any nucleotide
  misc_feature (843)..(843): n = any nucleotide
  misc_feature (871)..(871): n = any nucleotide
  misc_feature (897)..(897): n = any nucleotide
  misc_feature (1111)..(1111): n = any nucleotide
  misc_feature (1116)..(1147): n = any nucleotide
  misc_feature (1196)..(1196): n = any nucleotide
  misc_feature (1257)..(1257): n = any nucleotide
tatgaagacncagacatcttggaatataatgagaagtggccaaacatgtttagcaaatacaggaggagagcatcagttgcagtgttttgcatgtttgaacaaaaagataatatgctcagaaaaattgactatataaaagtaaggatatcatgaatcacaaaattgtcgcaagaagtcctcagaccaccaataaggaaaattcagcaaaaaataatagcacagtacaccgagtccttaacactactataaagcatcctacgacgcctcagctctctgtgttttcaataagtattgctttggtgggcttcgcaagcaagtccgtgtactcctggaagggagatttgctgaaacgagtctccatccagaaatctggtgtcaggaatccgtaggtcttcatgagacactcaaaggtggccttgacaaagtttccaagagtcttggtcgaaccacgagacgaggtgaagacgtcctcaatcccagcaaattggagaaccttctttggcacacgagcggccacgatccccgcacccctcggcgccggtaccattcgggacggtgaccgacccgcacttgccggtgaccttgcagggcacagtgtggggcttcccaatcttgttcccccagtaccccctcctgacggggattaccgagagcttggccaggatgatggcgccgcggattgcggtggcgacctccttggcgcacttgacgccgaggccgacgtggccatcagtgtcgccgacgacgacgaagccttgaacgggtgcgctggccggcncgggtctgcttctggacagcatgatcttcatgacntcatcnttaaggcngccaccgaggagggtntcgatgatctggtgttccttcacggggnagggagtgtaggtagatctgctcgangctggtgatctttccctccttgacgaggcgaccgagcttggtgacgggcacccacttctcctcctcctcgcgtcggccgccgcgacgcccacggcctcggtcgccacggccacggccacggtcacctcgaccgcggccaaacccacgcccaaagccaccacgatctccgccgcgctctgccatgaagatgaaagagttggaagagacgaggcgncgtcnnnnnnnnnnnnnnnnnnnnnnnnnnnnnnnnttgaatgaagcttaggatgatgatgcatgccttctttcagtttgctttngctttattttttgacaaggtaacgagttaatttacttaagtgtattaatttagaggtcttntggttggt

SEQ ID NO: 5215 - DNA, 640 bp, Musa acuminata
  misc_feature (141)..(141): n = any nucleotide
  misc_feature (339)..(367): n = any nucleotide
  misc_feature (623)..(623): n = any nucleotide
taatggctcaaccaaaagtttaagactctaacattaccatgtcactggcgacatgaggaaacatgcaaacaacaaacaatcaaatgtgaagtaaacatggcaacgtttctcacatcgtttgatactaatcaccacagcgcnaaaaatgagcacatcagtccgacgacgacgagccaagcttattacttaccactcacgacaagcaaccactactgcataacaaggccaccggccacggcaacgaaggagaagacagcaagaacaagggcaaacgcctgtggtacgggcttcgtgccagcgctgggccgcggggcagctgccggtgcagggatgcctccnnnnnnnnnnnnnnnnnnnnnnnnnnnnncgctgcttgtcgaaggggcaggagccggggaggtggaaggggcagcagaggaggacttggggatgttgatgtccaccttctggccgatggtgcagtggccggggaagccgcagaggaagtagtggtggcctttggtcttgatggtgatggagtcattaccggtggcgtatgtggcgatcggagatgaggcgttgcatgcattgtactcggccttggtcacctcaagcacgttgtggaagctattgttgtactcgancacgatggtgtctccat

SEQ ID NO: 5216 - DNA, 618 bp, Musa acuminata
  misc_feature (6)..(6): n = any nucleotide
attgtnaaggtctatattgatacaatgcacagtagaatggtcatacacaatgatcgaacttgtatacatcacagcaagaatggaattttatccatgtcttgtggaaataccacgcacacatcaatcattatactaactgtgggttaaatgcccatatatgattagccaatgatgcttctctccattcctataatgatcagaaagcacagcttgatgatgtcagttgtcgtcgatcaatttgtttacgatttctgattgccatgcaccaccagcaaatctgttgattaattgagccgcgatagctaccacagaccccagggcagcaccagcgatgacctgaataggagtatggccaagaagttcatgtagtggtctagtaacagacagaggatgctcttctggaagttcatacataatttgatttaacacctctgcctgctttccagcatgcagtcgaacaccaaaagcatcacacatcaccacaaatgctaatatcgccgctgtagcaaaagcagaactgtccaacccatcttgaattccaatagctagtgctagtgcagtcactgtggctgaatggggatgatgggcatcccaccagatccaataagctcggaccgc

SEQ ID NO: 5217 - DNA, 562 bp, Musa acuminata
  misc_feature (10)..(10): n = any nucleotide
  misc_feature (37)..(37): n = any nucleotide
  misc_feature (396)..(396): n = any nucleotide
  misc_feature (534)..(534): n = any nucleotide
cctccatttntgctgcttgaacaaatacctcatcaantttgggcactcattgtgctacatttatcacatacataacacattcccaacataaagtacattaaagatcacgatcaactaatacaagtataaataaatagtctgtcacggtgatgagaactcaaacaatctccgtaattgcttctcccccaaaccaacacagccttatcgaagcaaaggaggggttcatatctctgaaggaacgcgcaggtacaggtgggacggcaacctcggcgtggccacaacccgcaagggagtctgcatgaaggtgaccatccccggagtctccgtcatgtcgacgtcctccggcttgacaccgtccggcagagtccagctgaagtggtgcagcaggtggccgancatggaaggtgaccaggttgatgccaagctgcgccccggggcagacccggcggccggtgccgaacggcagcacccggaagtcgtgtcccttgatgtcgatgtcctcttccaggaaccgctcgggccggtactcgagcnggtttttccacgtcttggggtcacgggc

SEQ ID NO: 5218 - DNA, 555 bp, Musa acuminata
  misc_feature (10)..(10): n = any nucleotide
  misc_feature (29)..(29): n = any nucleotide
atagcatgcnactaataattactagagtnacacgagataaaagtaagttaaacatttgattaagacgacaaggcatgcggcttccaatgcatcataatgcgtaaagaagatttggcagaaggtttatctgatcacataaaagaaaaaactaaaagagaacagacacaaaccaggcttgattccagcaggggggatcatcatttcttcttttcactcactccagcagacctcatcttccggagaacattagccatctcctctctcttctttttggctctcttgtgtgtacccagctttctcttagcaactttcagtgcacgcttgtcctttccaactttcaacagctccgtaatcctcttctcataaggtgcaaacccagccacttccctgatcaagttcctaacaaaatgcaccctcttgctagttttcccttttctgctggaaggacgagggggcaactccctcctggtgacgatgtgccccttgttgagcccaacaaagagaccggtgttcggctgaggaggggcatctcaaagcccggcgagaaaacaccgt

SEQ ID NO: 5219 - DNA, 576 bp, Musa acuminata
  misc_feature (11)..(11): n = any nucleotide
  misc_feature (476)..(476): n = any nucleotide
  misc_feature (527)..(527): n = any nucleotide
  misc_feature (533)..(533): n = any nucleotide
accttcttatntacactgtcaaaggtactacagatacagttggttatgatttttgtgcagagagtacagagaggaagtgaacattatgtccttgttgctcctgtaaacctagaagggcccagacgtgccctggtatatgctatgggcaatgaagccagtttctttgcttttcctacaatgcacgcctcgtgaagttgttgtagtcattttcttcaatggcgtcaaggatctgtcgatatagcagcagagaagccaaaaccggccatctgctagctgaattcagctcgtatatgcccttctcagcctcctcaaagaacatcctggctcgcctaatctgtcccttcatgaagctcctccattcgtctgtcactcttcctttgaagatgtcatcatctgatagaccagcttgtgccaattcatcctgcggaaggtagattctccccctcctagatcttctccaacatcccttagtatgntggtagctgattggcaatgccaagagccaaggctgtttgtagacgctctcngtcgangccttcgaatctggggcatccccatcactggcaaatcatcagc

SEQ ID NO: 5220 - DNA, 568 bp, Musa acuminata
  misc_feature (11)..(11): n = any nucleotide
  misc_feature (31)..(31): n = any nucleotide
  misc_feature (38)..(38): n = any nucleotide
  misc_feature (86)..(86): n = any nucleotide
  misc_feature (94)..(94): n = any nucleotide
  misc_feature (119)..(119): n = any nucleotide
  misc_feature (190)..(190): n = any nucleotide
  misc_feature (258)..(258): n = any nucleotide
  misc_feature (266)..(266): n = any nucleotide
  misc_feature (297)..(297): n = any nucleotide
  misc_feature (327)..(327): n = any nucleotide
  misc_feature (410)..(410): n = any nucleotide
  misc_feature (434)..(435): n = any nucleotide
  misc_feature (441)..(441): n = any nucleotide
  misc_feature (448)..(448): n = any nucleotide
  misc_feature (450)..(450): n = any nucleotide
  misc_feature (453)..(453): n = any nucleotide
  misc_feature (478)..(478): n = any nucleotide
  misc_feature (486)..(486): n = any nucleotide
  misc_feature (488)..(488): n = any nucleotide
  misc_feature (493)..(493): n = any nucleotide
  misc_feature (535)..(535): n = any nucleotide
ggattagcatntgtctaactgaaagtatcancaataanaaaatgcaacatactcaatcgtgtcccaaaactaaatagaatacagangcagtagnatctgaattcataagactcgtgtcncttacggatgatcaatagaagagcggtgtgaatgaagaagggccagctcgtcctactgggggtgctgctgntattgcaatgctgattggaccaaatgctccaatttcttttgaaagtaaattcagaggaactcatatgnctcatgtntatgatttttataagccaaatctcgcaagtnaatacccggttgttgatggaaagctatcanagacatgctacctcatggctcttgattcttgttataaacgtttttgcagcaaatttgaaaagtttgagggaaagcaattctcnatttctgatgcggattattttgtnntccatnctccctntnacnagcttgtgcagaaaagtttgctcgnctctattntnaccgnttcttgcgcattcaagtgttgtcgagaggatgcaagggaaangctggagcagttctctaatctgactggtgatga

SEQ ID NO: 5221 - DNA, 562 bp, Musa acuminata
  misc_feature (18)..(18): n = any nucleotide
  misc_feature (22)..(22): n = any nucleotide
  misc_feature (36)..(36): n = any nucleotide
tgcctctgaaagcttagnttanaacatcaaaccttnatgaccctgccttttcatacactgtgcatcagttcccaaagatggacgactaccaacaaagtaaacaatgaaggagccaaaaaaaagaaaagctagtaaatcgaaacgaatcatgcaccacacgaagcatggtcaacatgcccgaagcaagactggacctacacgtgtgctaagcatatcacttagcgccaactgtacctcgcttgagccatgctcgcagcttattagacctgcaaggagggggaagaaccgagccaggttcttttccaaagaggtatcacccaatccggatatagcttgcagggtggacacaacaacgggtgcccgcgctgcgagttctcgccgtttcgcagaaccaactgggataagccagtgacttattggttgagcaccagtcgaagcttcaccagactgccccgtcgctgttctaatatacacctccagcacctcgttacagaggtcaaccaggcttgcttccgcttctaagttgctattacggtgccggtctgtgacaatgttttgaagc

SEQ ID NO: 5222 - DNA, 539 bp, Musa acuminata
  misc_feature (8)..(8): n = any nucleotide
  misc_feature (13)..(13): n = any nucleotide
  misc_feature (16)..(17): n = any nucleotide
  misc_feature (21)..(21): n = any nucleotide
  misc_feature (25)..(25): n = any nucleotide
  misc_feature (42)..(42): n = any nucleotide
  misc_feature (45)..(45): n = any nucleotide
  misc_feature (49)..(49): n = any nucleotide
  misc_feature (51)..(51): n = any nucleotide
  misc_feature (59)..(59): n = any nucleotide
tctttttnatcanatnntgtncaanatgcaaagcattcagantgntgtnantgcttggntacagcacggtgtatatggtagtagaaataccagttgatacactcatccaatacaattaccaactccaccttggatgcatgtgttgaagtaataggttccctcgtggctcgatcccaccaaattaagctgaagcaatcagttgttggggtccaaatcaaagtctttcaaaccttatattaagttacatacttctacattaattacgctcattgaagagctcaatggagagcctcgtttcggaagctgccgagacatgcgaacgcttcaaaatgacggcacgacgccatagtcgtcctccgccatgagggccgccaccgcctccgcggccgatgagtagatccggccgacttccgcctctacctccaccctcttcgcgaaccgccctttgatccttggccgcgctccgcgtaggccttcctcgacgcgtaccttatcgtcttctcgaacctccggcacttccgcttctccggtactcatca

SEQ ID NO: 5223 - DNA, 429 bp, Musa acuminata
ttaatttaacatggaatgaaatagagacatgctgatacagaaacagtgcgatctatagagcaatctatagtggtgtggcggtgaccggatgctacgttatgtgggttgaactcatctgcttgcatgcttccttcgtccaatccaaatccgtcgtcgtcatcgctatctacatcctgattcttccgaggaggcagccattagctgggagctgcgaacccgccacccttcatcatctgcttgaactccttaaagttgacgacgccgtcaccgtccacgtccacctcgttgatcatcttccggcagtcctcggcggtgcggccttgcttgaggccgagggaggcgagcacggagcgcagtcttccacggtgatgaacccgtcgccgttgcggtcgaacacgttgaaggcctcgcgcatgtcctcctcctcgt

SEQ ID NO: 5224 - DNA, 498 bp, Musa acuminata
  misc_feature (432)..(432): n = any nucleotide
  misc_feature (436)..(436): n = any nucleotide
  misc_feature (438)..(439): n = any nucleotide
  misc_feature (445)..(445): n = any nucleotide
  misc_feature (447)..(447): n = any nucleotide
  misc_feature (449)..(449): n = any nucleotide
  misc_feature (456)..(456): n = any nucleotide
  misc_feature (458)..(458): n = any nucleotide
  misc_feature (461)..(461): n = any nucleotide
  misc_feature (477)..(477): n = any nucleotide
cttgcaatgaataatagaagaggatggttcataatttaaaatgggtctgaagaaattctcgttgacatcggccaactaataaccaaaccattcgatatgtgtaccaaactatttctggaacaaatatgatgcaatctaaaacaacatctgttgctcatctcaagcaccattaagtcgttacacgatagcatttgctgcactagcaattcttggccacagatcggcacattccttcccgatgggtcccgtgatagcagatcctttcatttctcccttcggattaacaatgactccagcattatcttcgaagtacatatagacgccgtcctttcggcgccagggcttgcgctggcggacgatgacagcgggcatgaccttcttccggagatcaggcttccccttcttgacggtggccatgaccatgtctccgangcangnngaaggnangnggttgangnggnccttgatccccttganggagatgatgtagaggttctt

SEQ ID NO: 5225 - DNA, 485 bp, Musa acuminata
tcgtcgtcggtgggccacggtcgtggagacgcgattgggcgagggagggtgcagctgaagcggatcgagaacaagatcaaccggcaggtgaccttctccaagcgccgatcggggctgctcaagaaggcccacgagatctccgtcctctgcgacgccgaggttgccctcatcgtcttctccaccaagggcaagctctatgagtactccaccgactccagtatggaaaagattcttgaacgttacgagtattactcctacgcagaaaaggctcttatgtcatccgatcaagattatcagggcaactggtgtcaagaatatggaaaacttaaggctaaggttgaagctttaagtaaaagtcaaaggcatctaatgggagaacaacttgaggccttgaatcttaaagaactccagcaactggagcatcagcttgaaatttctctgaagcatattaggtcaagaaagaaccaagtcatgtttgactccat

SEQ ID NO: 5226 - DNA, 499 bp, Musa acuminata
  misc_feature (12)..(12): n = any nucleotide
  misc_feature (86)..(86): n = any nucleotide
tggaggaggagntggagatggggaggggaagggtggagctgaagcggatcgagaacaagatcaaccggcaggtgacctttgcgaangcaggaatggactgctcaagaaggcctacgagctgtcggtgctctgcgacgccgaggttgccctcatcgtcttctccaaccgcgggaagctctacgagttctgcagcagctccagtatgttgaggacactagagaggtaccaaaagtgcaattatggtgcaccagaaacaaatatcatatcaagggagactcagagtagtcagcaagagtatttgaagcttaaggcgcgtgttgatggcttgcagcgatcacaaagaaatctgctgggtgaagatctggggccacttaacatcaaggaacttgagcagcttgagcgccaacttgatgcatcgttaagacaaataagatcaacaaggacacaatacatgcttgaccagcttggagatctccaaagacgggaacaaatgctatgt

SEQ ID NO: 5227 - DNA, 563 bp, Musa acuminata
  misc_feature (15)..(15): n = any nucleotide
  misc_feature (92)..(92): n = any nucleotide
  misc_feature (473)..(473): n = any nucleotide
  misc_feature (541)..(541): n = any nucleotide
  misc_feature (552)..(552): n = any nucleotide
aaacatatactaatntgtaaagtacatgtttactatgtttagcatgtttagcctggtttttctatgataaattcatagtacaacaacacgantcaaatgtctacaagatcagcagactgtttggttcccaataatgaagtttagttctgaagttgaagacatcatgagcaccaaactctcttttggtgatttcttcggttatgcattgcatctcccaggtacatcaatcttcatgttcgtcttcaccttcagaatctgatctaatatcttcgccgagttgccctgattggatttgtttcacaagcattcggaacattaatatccaccaatagatatgtaaaacaagcagtgagaataggagagtgttgaagacataataatatattggtccttcaaacttgtgtttttctttgtccaaattcaagagaacttcatagcttgtacttcgaaggatccagaaaggaaaatatgtnagacgaagtattatccatgaaaacaacatataggagaaaatgctacattaggcaaggcatctcataancgccatacttngacatctttgc

SEQ ID NO: 5228 - DNA, 865 bp, Musa acuminata
  misc_feature (401)..(401): n = any nucleotide
  misc_feature (855)..(855): n = any nucleotide
atcttctcacatcagcgaattccacgatcttcttctttgtcatgcaaagacagacagcagaggcagtcattcctcgttgtcattttattggatggtaagatagcattacagcatcacgaactgagcatgcaagcaagcttatttatatagatcgatgtatttatatatgcttgcacgagatggtgtggaagagaggcaacagatcagtcgccgcagttgacgaactggtagttgacaatcaagtggcctcgattgtagccgccaccatcggtatccagttgagagaagacgccttggtctaaatctaaccctccgttggcgcactggtccacgatcctgaccgtagcctgagttcccgtcgccgtgttcgtcacccgcaagcacttgccacccacgcgtcngggatgagttacgggatgctgtcttgcttgtgtttgcgaacaaacaagaccttccaaatgcaatgaatgctgctgaaatcactgataagcttggtctgcattccttgcgtcagcgacactggtacatacagagcacttgtgctacatctggtgagggcttgtacgagggacttgattggctctccagcaacatagccagcaagtgaccaaagttgctcaacggccctcaacagcagacaaaatttggcatttcagtgttggatgctttggtgaatcgttaccaagacaacaaaatttgaaggttccactggttaccaaaactttaaagatatcggctgcctcagaccttttatgctttttatctatctactcctttttctggatatatctaggatgatgatactcttgtcatatatttctcacaccactgggtgcccattatgtcatctgatanttcttactta

SEQ ID NO: 5229 - DNA, 599 bp, Musa acuminata
cacggccatgcaattttccttccagaattctgtcatcaaggcgaaaattcactactttgttgattaaaagatgatacaacaaaattaaatacagaagcagaaccttacaaatcgtgagtcacattcgtgttcaaaaattctctcaactcttccaagactatgcatggttgccaacctcagatttcagtccttagctctccccaagagtgaagcgaacaaacctcctaactttgatgttctctccgagggcagcaactgtctgcttcaccagatccttcaccttaatgctatcatctttgatgaagggttgctccagaagagcaagctctcctagcctctttgtgatccttccttcaacaatcttctcctttatttgatcgggtttcgacttgagatcctctctctgcatttctatatctttttcctttgtgacaatactctctgggatgtcctcgatggagacgaactcaacctgtgggcaggccactacctgcatagcaaggtcatcaaccaattccttgaacttttcgctccgccccacaaaatcagtttcacagttgacttcaatgagtgtgccgatgcgggagtcatggatgtag

SEQ ID NO: 5230 - DNA, 519 bp, Zea mays
atggcgtccaactacgtggacacgacgggcgaggagggacggttccacggccctcacagccacagcaccagcacgaccccgacgggcggcgcggcggcggcggcggcatcgccgcgcaacttccggcgcagcttctcctccgcgtcctccgcgggccacagccacggcggcggcggcgccgtattcaaacgttcgccccctccctgcttccgatcactgtcctgctccacaaccgttgtttcctgcgttgtgttcgttcacccctcccccccactactccgcccccgcccgccatcccccctgttacctacacacacctcattatccaggagtgaagatgttgacgccacaccacataacgccgacacctgtctcactccccgcgccagcatacccatagcattccccccctatctcatctcgcccatcgcctcctctccacccggactagtatcctggctcgcgccctgtcgcgattcagacccgccttatatactctatattcttttccgtgactta

SEQ ID NO: 5231 - DNA, 672 bp, Zea mays
atgtactcaactgacagtgtatttttgatctttaaaattagagatgctctcattcccctgctggtggtggcagaagcggcccgagtacactttcgcgtgcatgttcctggacatgctgacggggaagtccccggcgcccgcggtgctgcacgacgaggtcgtggacctcccgcgctgggcgcgttccgtggtgaaggaggagtggacgtccgaggtgttcgacacggagctgctcaggcacccgggcgccgaggacgagatggtggagatgctgcggctggccatggactgcaccgagcccgctccggaccagcggccggccatgcccgagatcgtggcgcgcatcgaggggctcggcggcacggcgtcgacgtcgacggcgacggcgcggtccggccggagtgcgtccgtggacgaggcggacgaccggccgctgaggaccaccggatcgatccgtcagagctgaggtccgtccgcgtccgatcacttgtgttattgtcactgacggaaggttctgaacaagggggaaaaaaagaagagatctttctgttctgtcttcttgcgcttgtcgtaggggcgttgtcgtgtgctgtttattctttcatgcgtctcttgacgcttgttcgccctcagatgaattctttcgttttagcagcggtgatgagtgtgcgc

SEQ ID NO: 5232 - DNA, 537 bp, Zea mays
atgacgatacaagttgttcaggacaacagcaggatctgcacttcttttcagctcaattactacacgcattccagtgcggtcactttcatccctaatatcacttataccttccaataccttatcttcaacaagctcagctatcttttgtacaagagtagctttgttagtttggtatggaatctctttaataataatagctgtgcgcttgcttttctcgtcaattgtttcgatgccagactttcccctcacaaccatgcggccacgtccagatttatatgcttccaaaataaccttgatttcccagcattgtccctcctggtacggaagtcaggcaccaggcatgcgcttctagtatttcttggaaccgcaacttccccggctttccacataacttaccgaaagccccttcaactagcctctccccagattatgaggaaggaatattctgtctgccttttcaaccccgaatcccagaaacaaccatttcaccacaaaaaaggagactcccgcactggcacgagaaaggcctcccttctg

SEQ ID NO: 5233 - DNA, 516 bp, Zea mays
atggaggccctgaacagtgataagagtactaccttagaaactgagaccttgaatgaacagaagaaccagctgactgacaagcttgaggcaaacaaagatgagcttgagaaaactaagaaggcaatggagggtctggcctcagccttacaggaaatgtcagctgaatccagagaggcgcaagagaagtaccttctcaaacaagatgagattgagcgtgctcaggcacaggtagaggagcttagcttgagtctgaagaatactaaggagaactatgagctattgcttgatgaggcaaactatgagaaggtttgccttacgaaaacagttgaaagactgaaagcagaagcaaagagtgcacatgaggaatggcattccaaagagctaagttttgtcaattctattaagaattcagaggaagagatagttgctatcagagttcagatgatcaggaccttggaggttgttatagagaaagaacgtgacaacactgagttgcaggagaagctgcagcagctt

SEQ ID NO: 5234 - DNA, 270 bp, Zea mays
atgacgcccgatcacccatcgcggaggccgcagcgagcgcggggcagcgcgacgacgacctcctccgcaccgccacaccttcctcgcttgaggccatcgacgccaagctcaggtcgctggatctcaagtaccagagacctaccgccgccaagctctacctccacgtcggcggggcctcgccttccgcgcgctgggtgcccgccgagcgccgcgcgacctacgcattcgtcgaccagtcgagcgacgacgcctcctcccccaggtggttcc

SEQ ID NO: 5235 - DNA, 720 bp, Zea mays
atggttgctatggcggcgccagggcgagtggcgctcctggccgccgcactcctgttcggcgccttcttcccatccgcgttcgccacgtccttgtaccccgcaaggcttgcgggcaggctcctgtccaccacggcgtcggcggtggccaagcagctgtggtcgctcaaatcggccgccaccaagacggcgacggcgtccgtggcggggcggtccatggtgcggtacgagggcgggtacgcggtggacacggtgttcgacggcagcaagctggggatcgagccgcacgccgcccagatcaaccgcgccggcgacctcctcctgctcgactccatcaacagcaacatctacagggtccagctgccgttgtcaccatatagcagaccaaagctccttgctggttctccagaaggtttatctggccatgttgatggaagactgcgagaagcgaggatgaaccatcctaaggggttccctgtggatgataggggcaacatttatgttgcagatgctatgaacatggcaataagaaagatcagtgacacagggggtaccaacattgctggggggaaaacaattaaaggagggtaccagaatgagcccagtggcagcgatgatgcagatgtcccccccattcatgacgtccaaaacttcagtttttactgcacccctcttgaccttgaaataacgaaaccacgaatttccacaattttccctgaacta

SEQ ID NO: 5236 - DNA, 624 bp, Zea mays
  misc_feature (13)..(13): n = any nucleotide
atgctgcactccntagaggagtctcagctgatgcgagagaagcttgccgagcagcatagggacttgctgcaggcaaaggatgaagccatgagggcaggggacgctaggaattccttccagactgcaatgtacgatggaatgcgaaggccaatgcactcaatccttggtctcgtctcaatgatgcaacaggagagcatgaatccagagcaaaggcttgtgatggatgccattgccaagacaagcagtgttgcatccacactgatgaacgatgtgatgcaaacatcgacaatgaactgtgagcacttgtctttggtcaggaggccgttcaaccttcattccttcattaaagaagttgttggagtggtcagatgtctaactggttgcaagggtgtggagtttgagtttcaagtggagaattctttgccagaaaggatcattggtgatgagaagagagtcttccatattgtcctgcacatggtaggcactctaacagaccgatgtaatgctggctgtatctcattatatgtaaatggtcataatgaggttgaagataggcataatcatgactggatgctgcgaagagcaaacttctcgggggggctatgtatgtgtgaaatttgcgat

SEQ ID NO: 5237 - DNA, 732 bp, Zea mays
  misc_feature (732)..(732): n = any nucleotide
atggacacgggcaagtacgtgcggtacacgccggagcaggtggaggcgctggagcgggtgtacgccgagtgccccaagcccagctccgcgcgcaggcagcagctgctacgcgagtgccccatcctctcaaacatcgaggccaagcagattaaagtctggttccagaaccggaggtgccgtgacaagcaacgcaatgagtcttcgaggctccagtccgtgaacagaaagttgactgcaatgaacaagcttctcatggaggagaatgagcgattgcagaagcaggtttcccagctggttcacgagaatgcgtacatgaagcagcagctgcagaatccgtcactggcaactgatgcgagctgtgagtcaaatgcgaccactcctgcaaacctaagggatgcgagtaacccatcagggctccttgcaattgcagaggagaccttgacagagttcctctcaaaggctacagggactgctattgattgggtccagatgcctgggatgaagcctggtccggattcttttggtattgtgaccatttcacatggtggccgtggtgtcgctgcccgtgcctgtggtctggtgaacctagaaccaccaaagatagtggaaatcttgaaagatcgtccatcttggtttcgtgattgtcggagtcttgaagtctatacaatgttaccagctggaaatggtggaaccattgaacttgttacatgcagatgtatgctcctactactn

SEQ ID NO: 5238 - DNA, 507 bp, Zea mays
  misc_feature (451)..(451): n = any nucleotide
atggctgagaagaagatggttacgctcaggagctccgaccacgaggagttcgaggttgaggaggcggtggcgatgaagtcagagatcatccgtctcttgatcgaggacgactgcgccgacaacgccatcccgcttcccaacgtggattccaagactctcgccctggtcatcgagtactgcaacaagcacgtccacgtcgccgccgacgactccgccgccgcggagaccagcaacgcttcatcagctgggggcggcggcgaggtcgacctcaagaagtgggacgcggagttcgtcaaggtcgagcaggcgacgctcttcgacctcatcctggctgccaactatctcgacatcaaggggttgctggacctgacctgccagacggtggccgacatgatgaagggcaagtcaccggaggagatccgcaggacattcaacatcaagaacgacttcnaccgaagaggaggaggaggagatccgcagggagaactcctgggccttcgactgatg

SEQ ID NO: 5239 - DNA, 411 bp, Zea mays
atggccatgcccaacccaagaacggtgttgacatccgcgccgtcaccgcccggctcctcctcctcctcctcctcctcctcctcctggtcggcggcggagttcatggcgccagcgcctccgtcgccctccgacggggagctgctgcgctcgctgcaccgcctggcgcgggacctgtccgctgcggccgagacgccggccccgttcctgcgcggcgcgctcgcgtccatcaccaggcgttccaagctcctggccgcggcgttcgacgacctggtcccgtgcgccgcggccgaggacatgccgcggcccgcgacgctgtgcctgcgcgaggtgctcctcgtgctgcagcgcttcaaagacctggccgccgactgcaccgcgcgaaaccggatgcgactgctgctgcgcttggac

SEQ ID NO: 5240 - DNA, 612 bp, Zea mays
  misc_feature (63)..(63): n = any nucleotide
  misc_feature (70)..(70): n = any nucleotide
  misc_feature (86)..(86): n = any nucleotide
  misc_feature (101)..(101): n = any nucleotide
  misc_feature (113)..(113): n = any nucleotide
atgccatttgagaaggcagctacactgggaaaaatcaaaattgtattggatgttgcgcatctngagtccnttacaaaggatggganctatgatctaaactntaagaatcagcntaatgatggagcccatattctctcagcccagcatctgggtgatctgtacagagattttgtcaaggatttccctattgtatcaattgaggacccttttgatcaggatgactggagttcatgggcatcattgcagtcctcagttgatatccaaattgtgggtgatgatttactcgtcacaaacccaaaacgtatagcagatgctattgacaagaaggcttgcaatgctctgttgctaaaggtcaaccagattggtactgtcactgaatcaattgaagctgctctcgattcaaaagctgctggttggggtgtgatggtcagccacagaagtggtgaaaccgaagacaacttcatcgcagatttggctattggcttagcaagtgggcagattaaaaccggggctccatgccgcagcgagaggctggccaaatacaatcagcttctgcggattgaagaggagcttggtaacgtgcgctatgcaggggaggcattcaggtctcca

SEQ ID NO: 5241 - DNA, 336 bp, Zea mays
atggccgcggacgccaccgcctccgcctcctcctcgtccgccgcatacctcccgacctcgcgcctggacatccaggccgccgtcgccaaggccgccgagctgcgcgcgctccacgccgcgctcctccagggcggcagcagcagcggtggcgccgtcgccgccccgtccaatgtcgggggctacgccagcgctagacggagcctcgccgtcatccgcctgccgccggccgcgtcgtcggagccggcccccctggccacggccgccgaggactaccccgtgattgcgccgacttatgatgaagagcacttgtgttggaacgatctactttccccaaga

SEQ ID NO: 5242 - DNA, 537 bp, Zea mays
  misc_feature (75)..(75): n = any nucleotide
  misc_feature (113)..(113): n = any nucleotide
atggagaccgcaccgttcagaccgggaagctccggcaacggcgctccgctgcccatgtccagggccggggccgtnccggcggcggcggcgcgtccgcccgtggggcagctgcntaagtcgatcctgaagaagagcaccgatgaaggaaactctgggaccgccagggaggtatctcgtgtgacgttcatgctggacggcggcgcaccaatggtggtcaaggccgccaaatccgtgggtttcgcttcttcccagccacccccgcgcccgctgttgcagcagcccatgcggccgaaccagcctcgccccagcggcttccccggtggacagcagcaggtggggtacccacctcggtccggcgacagcccgccgcagcagttcccgcctcgtccgagcggcggcgccgagattccagcgtggaagatgggggagagggagttcaaggaggaggtgtggaggctgatgacggggatcgccaagctggtggagccgctgaccgacaagaacggcttcttcccctaccacctgttccgagcacag

SEQ ID NO: 5243 - DNA, 345 bp, Zea mays
atggcagcaccaaaagcagagtttgcggatggctacttggatgctgctataatcaaggactgcccgcggtgggatgttctggggctcgtgctccagatgaaggacggcgcctacgtgaactcgccgtgcgtggagtatttcaaggtgaaggcgatccggatcgagccgggcctgcgcgtgggcagcagcaccaagggcggtatcatcgactcggacggggaggtgctcgcgaggggcgacgggtcccactcccgcgccggcgacgagccggggcacctgatggcgtacggcccgcccatccagctgacggtggaccaggggctggccaccatcttctccccgaga

SEQ ID NO: 5244 - DNA, 564 bp, Zea mays
atgcaggctgcatctggtactaaaggtggctcaagtggttctcctgttgttgattgtcaaggaagggctgttgccctgaatgctggaagcaaatcttccagtgcctctgccttcttccttccattagaacgtgttgtcagagcattggatttgatacgtgacagttgggatgcatttggtaccaagacagaatctgtttatattccacgtggtacacttcaggcaacctttcaacacaaaggatttgaagaaactcgacgtcttggcctccggaatgaaacggagcagatggtgcgtgtagtttctccagaaggcgagactggaatgctggttgtcgattcagtggtacctgaaggccctgcacataaacatttagaacctggtgatgttctagtacgcatcaatgaggaggttgtaactcagtttcttagattggagactttacttgatgatagtgttggcaaggaaattgatttgcagatagagaggggtggagttcctttaactgtaaacctgcaggttgaggatttgcactctataactccaaatcatttttttggaagt

SEQ ID NO: 5245 - DNA, 489 bp, Zea mays
  misc_feature (488)..(488): n = any nucleotide
atgaacttgttcgcgggggtcggcggcggggcggcggacggtggcggcacaggcacggcgctcctggagctgacgccgcacaagatggcggtgtgccacctcgtgcaggtctttgcgccggcggcgcaggccgggggcgacgtcgtgccgcccttccccttcgagtccctcactcaccacaaccgcctcggactcttcctgtttacgctcacccggtcatgcgatgattttctggagcctccactggaagaatttttgaagcagctgagggcagtggatgatttgactaatggttggttctgcgagcagctgacaagtgccctgtcagcactcaactcacctgatgacttgttcaacttctttgataagctacgaggtgtgttcactgcaccagagggtgcgagtgcagaagatgtattcttggatccaaatagccaacttggagtatttcttcgttgctgcatacttgccttcaactcaatgacctnt

SEQ ID NO: 5246 - DNA, 525 bp, Zea mays
atgatgcgatgcatggactacggccacaaggttgtcgctttggctaatcttatccccctcgacgacaccgtcgatgagctcgacagctacatgtaccaaactgttgggcaccagattgtggtgagctacgcgaaatgcatgggcttgcctcttttccggaggcgcattcgcggatccacaagggatcagggtctcaggtacagtgtcacggcaggtgatgaggtagaagatatgtttgctctgttgagcgaggttaaacgtcgaatcccatccatcagcgcggtgtcgtcaggtgcaatcgcatccgattaccagaggctccgggttgagagtgtttgctcgaggctgggcctggtctcgctggcgtatctatggaagcaggatcagactttgctcctagaggaaatgataaggaggggcattgtggcaataattgtgaaggttgctgcactggggctgaaaccttcttcccacttaggaattatggaatcaatgtctgtggtgaaggtggagaatatgaaacac

SEQ ID NO: 5247 - DNA, 288 bp, Zea mays
atgagatttaagagaaaaaaaacttcgcagttcacaagtgattactcaatgcagctcaatgcttctagaattaaagtccttcaagctcaggatgatttggtaacagatatgttgaagtcagcaagcaaagagctactgcgcataagtagagatcacctcacttacaagaagcttctcaagacacttattgttcagagtttgctgcgcctgaaagaaccagctgtgcttctgcgctgcaggaaggaggatctccaccttgttgatttagttttggggtctgcaaggaaa

SEQ ID NO: 5248 - DNA, 504 bp, Zea mays
atgcccgggggtttgtggagtcccggcgcgggggggcaggggggtggggctcgggcgggtgggcggacagagggtcggtttcggggcccgggcggttcgccgcaatctaggggggagaggtgtcgcgcgggccgggctggattggataggttgggcagcggattgggaggaaggctggtagggccccagggacaggggaagaagacagggattggaaaggaatcgaagggactcagggttcgaaccggtgggtgggggagaaacgtttggtgcggccgaccggccaggttcggaggatgggagaagcggggccctggccaggggacatttggtggcggtgctcgggcagcagtgggcggggggctggtcatgctcgaggggtgtcgacgatgtcttggcagggagttcagctcggccttggagattcaccacctactgctggagcgcgaaggatgtgggcgacgcagcggtagacgggggtcgcggagccgcacctgggcctcg

SEQ ID NO: 5249 - DNA, 705 bp, Zea mays
  misc_feature (594)..(594): n = any nucleotide
atggcgacgaagaggagcgtgggcaccctcggcgaggcggatctgaaggggaagaaggtgttcgtgcgcgccgacctcaacgtcccgctcgacgatgcccagaagatcaccgacgacacccgcatccgcgcctccgtccccaccatcaagttcctcctcgagaagggcgccaaggtcatcctcgccagccacctgggtcgtccaaaaggtgtcaccccaaagtacagcttgaagcctcttgttccacgcttgtctgagctccttggagttgaagtcgtgatggccaatgattgcattggtgaggaagtcgagaagttggctgccgctttgccagaaggtggagttctgctcctagagaatgttagattctacaaggaggaagagaagaacgaacctgagtttgctaagaagcttgcatctgttgctgacctttatgtcaatgatgcttttggcacggcacacagagctcatgcttcaaccgaaggagttaccaagtatttgaaagctgctgttgctggcttcctcatgcagaaggaacttgactaccttgttggagctgttgccaaccaaagaagcatttgccgccattgttgntggatcaaggtcttcactaagattggggtcattgagtcgttgctgccgaaagtcgaatccgtatccttggtgggggatgatctaccattttacaggcacaggaaattttgg

SEQ ID NO: 5250 - DNA, 594 bp, Zea mays
atgggccgaactcagcgggcgggacaactgggacgggctcctggacccgctcgacggcgacctccggcgcgccgtcatccggtacggggagctggcgcaggcgacgtcggacgcgttcatcggcgacccggcgtcgccgtacgcgggcgcgtcgcggtacgcccccggcgcgttcctccgcagggcgcaggcgcccgacccggacgcgtacaacgtgacgaggttcctgtacgcgacgtcgagcgcgcgcgtccccggccagttcatcacgcggccggcgccgccgggggcgtggagcgccgagtccaactggatggggtacgtcgccgtggccacggacgccggcgtcgcgaggctggggaggcgggacatcgtggtggcgtggcgcgggaccaagcgcgccgtggagtgggccaacgacctggacatcacgctggtgccgccgaagggcgtcctcgggcctggacccgggaggccgcaaccggcggagcacccgagccatctggtccgggtaaccctctaagaaactcctcgctccggttcaccacgcacagagccagagaaaatttgtttggccaggattcaaaaggcctc

SEQ ID NO: 5251 - DNA, 492 bp, Zea mays
atgtatgagcagttccaaaacattctgaaaatgggtcctattggacaggtcttctctatgttgcctgggtttagcgccgaactaatgccaaaaggacatgagaaggaaagccaggctaagattaagcgctacatgacaatgatggattccatgactgatgcagagcttgacagcacaaatcctaagctgatgactgaatcacggatcattcggattgcacgggggtctggtcgtcctgtcagggatgtcatcgacatgctggaagagtataagcggcttgctaaaatctggggcaagatgaagggtctcaagatcccaaagaaaggggagatgagtgcactgtcccgcaacatgaatgttcagcacatgagcaaggtccttcctccgcagatgcttaaacagattggtggcatgggcggtctgcagtctctgatgaaacagatgggatcgaaggagatgagcggaatgtttggaggcatgggtggcgagcgg

SEQ ID NO: 5252 - DNA, 702 bp, Zea mays
atgatggttctgtgccccacacttcaaaagttgaaagagaagagggtgaattgtcgcctaacggagattttgaagaggaccattttgttcctttcgaagatggaacatctaaaggaaaggaagattctacaagcagaccattccatggtaggcctggggaagtggtaccctcttctgccgaggcagctggtgagaatgatgctgatgctgatgacgagggtgaggaaagtgctcagaggtctactgaggacagtgaaaatgcttcagaggcgggtgaagatgcatcgggtagtgaatctggtgatggtgaggaatgctctcgtgaagatcatgatgaggaagaagaggatatggatcacgatgatcaggatgcaaaagctgaaagtgagggtgaggcagaaggaacaactgaaacacatgatgtggaaggggggaatatcactaccactttcagaacgctttctgtactcagttaaaccacttgccaagcatgtacctacagctttacatgatcgagagttctcacgtgtattttatggaaacgattcattttatgtgttggtcagactacatcagattttatatgagagactactttcagcaagaactaattctttcactgctgaaaagaatggagggaatctaagggtacaaccctcgtggattatatgcaaagtttatgagcgcgctgttcaaactgct

SEQ ID NO: 5253 - DNA, 240 bp, Zea mays
atgacgttggggatggtgcggatgcggatgccggccggctcggcagcggcggcggcggaggaggagcggatgagtccgagccactcctcggtgacgacgaaggtgaccgccgcgccccgggctgcgaggaggcggctcaggttcatcatggcgttgacatggccgcggcccgggaacggcaccgctacaatgtggcagccgcagccgccggtcccgcccgcggcggcggccatccgcgcg

SEQ ID NO: 5254 - DNA, 669 bp, Zea mays
atggaccagggccacctcaaggacagcctcctcgtcccgtcctcccgcgccgccgcgacgaatgggccccaccaccgccgcgccacgctcgcgccgggaactggcgccggaggcccatgtggcggagccggcggcgtgtccatcgacgtcaacggcctgaagcggcgtggcggcgggaggcgctcgtgggtgcgcgtggacgcggcgacgggcgccgcggaggccgtcgaggtcgccaagccggcgttgatgcggcggctggacctgcccgcgcgggacctccgcctcctcgaccccctcttcgtctacccgtccgccatcctcggccgcgagcgcgccgtcgtctgcaacctcgagcacctgcggtgcatcatcaccgccgatgaggcgctcgttctgcgcgaacccgacgccgctgggggcgccgcagcggaggaggccgtgaggaggtacgtcgacgagctgcagcgacgcctcgtcgaccgcgccgacgacctgcctttcgagttcatcgcgctggaggtcgcgctggaggccgcttgctccttcctagactcgcaggctattgaattagaggctgaagcttacccagtactagatgagctgacagcaaaaattagtaccctcaacttggaaagagtccgacgcctaaaagcaagctggttgcat

SEQ ID NO: 5255 - DNA, 264 bp, Zea mays
atgggcaggtcagacggcggcgcctccagtgactgcagctccccgacgccgtcctccaccaggaacgccatggcgagaccccaggtgatgtgcacgtccaggtggcagtgcatgagccacaccccgggattatccgccacgaagcggatgaccgcccagccgttgaccggcacgcccaccgtgttcctcatgggcgggtcgtccatgttgaagctggcggtgtccgcggcggcgtcgaagttgccgaagccctcggcgaggatg

SEQ ID NO: 5256 - DNA, 231 bp, Zea mays
atgcttccccggtctcagctatcgggtttgagggctatgagaagcgccttgagatcacattctctgaggcacctgtctttgtggaccctcatgggcgtggtttgcgtgccctctccagggcccagattgactctgttctggatcttgcacggtgcacaattgtgtctgagctctccaacaaggatttcgactcatatgtcctttctgagtcaagcttgtttatctatcctc

SEQ ID NO: 5257 - DNA, 495 bp, Zea mays
  misc_feature (151)..(298): n = any nucleotide
atgcgcgtcttggtgcccggctgccggatctccgacacccacttgccccacttgcgcctccgcacgccccggtactgctgctgcggcgacggcggcggcgactgcggctgctggcaggcggcgctcgcacccacgcaagcggacgcgtggnnnnnnnnnnnnnnnnnnnnnnnnnnnnnnnnnnnnnnnnnnnnnnnnnnnnnnnnnnnnnnnnnnnnnnnnnnnnnnnnnnnnnnnnnnnnnnnnnnnnnnnnnnnnnnnnnnnnnnnnnnnnnnnnnnnnnnnnnnnnnnnnnnnnttaggttcgtatcgccttccggtgctccttcctatgacaggttaaatccccgtttctgcccgtcccccgccccatctggacgcttctacataagcttgcttctgtcttatataagagtttcccccccgtatcacgccccattcgtaccactcttggcactcactgccctgtcccctctggctattttaattttctgt

SEQ ID NO: 5258 - DNA, 336 bp, Zea mays
atggtgcatctatgcagtggtgagcagcagcaacagcatcttgctgaagcacaggagcagggcatcgtgtctttgctggaggagctagcagaaagtggcacggacagaggaaagaggaaagctgtgcagctgctcgaacgaatgaatcggttcctaaagcagcagagtcaagccgaagccgaagcagaggccatggcacaggctcatgcacaagcacaagcacaagcacaagcacaagcacaagcgcagcctcagatcctggttcaagctcaagcacatgcagatatgcaagctgaacgatcactacttcccacatcatctgacatttcggataga

SEQ ID NO: 5259 - DNA, 240 bp, Zea mays
atgaatcgaacaatccaggtgcatatggcagcagctctatttatggtgactcaacctggaggttcaactcatctgaggttgatatgcctccttttggtcatgatcttggaaatgatgatccagatatcaaatcagaaatatcagcaagctatatgggcaactatactgttaataacaatcagacaagcagaggtatcacttcctagggagagtactattatattcatatatgacttggga

SEQ ID NO: 5260 - DNA, 153 bp, Zea mays
atgtcccaggcaacaagcaaccagctcgccctgctccacagaaagctacagctgaagatgatgagcttgctgcactgcaagctgaaatggcactgtgatcaggtttccactgaagaggtgaaatgtgtatatgaattgcgttatgctgaaagc

SEQ ID NO: 5261 - DNA, 351 bp, Zea mays
atgtctggagggctcgcacaccttatcagagcccagttcacgccctcgaagaaaggatgctgctttatctcggtagcgccacgcttatacccaagtcggtgctgcgggtccttgactagcaatccccttatcatgtccctcgcagagaagctcactattggggactctgggaacctcaggggctggccaacaacgttgaagagtgtaccccggttgcctgaacctttgagtggagtcttcgcgaacaacagctcgtacaagaatatgccagaggtccaccaatccacaacacttccatgggcctctcctttttattccctcgtggggccaaaatacgcaggggcagcgaac

SEQ ID NO: 5262 - DNA, 417 bp, Zea mays
atgtgtgctgctaccacaactaccaaactctgcagctgcaatcatggcagctgccaacgcccgccgtcgcaactgaaacgctgcacctggatcactttacagcagcagcaacgtgttcgcgatcaggtctggtcatctggtttcttgtgtggaggcggccggcataccggcatggtgtgtgcttccagacggcgaaaaatggcgcgcatggttcggcgccgttcaactgcaaagggggacggtgcacgccaccgcctgcgcccagtaattgagccgcgccttcacctcgtcagggctgtcaccggggctggagatcttccagttggtgacaggcggggacggcgtggaggcatctggtggggaggactcgtgctgctgcggcttctcgtcgccagctgggagggctggctcatggag

SEQ ID NO: 5263 - DNA, 642 bp, Zea mays
  misc_feature (288)..(288): n = any nucleotide
  misc_feature (373)..(373): n = any nucleotide
atgcttcgtttcgtcgtctgccctgatcatttcggccttatgaggactgctatccttgtctgtagtatcctccttgggtttactctctcgacctgtggctgtggccttctgctcggctcccgtgccttggggagggtagtattgcggatcggcgaggaacgagagcgccgagacgacgtcgctgatccccggccggctggcagcgtcctcctgcaagcacatggacgcgacggcgagcgcctggaacagccccttcacggggtacctcttgcccagcaacgggtcggncagcttcatgaacctccgcctgtctctcagcagaggcgttgcccagtgaacgaggacctgctcctcggacggcctcgtgacgtcnatggcgcggcggccggtgatgagctcgagcagcacgacgccgaagctgtagatgtccgacatcttggtgagcttgccggtcatggcgtactcgggggcgcagtcaccgtacgttgccatgaccctggtgctgacgtgggtctgggcccccagggggcccagtttgggagcccgaatccgagcactggggttggattccctgtcagggaggagttgtgctcccttcgggccggggaaataaggggtggttgggcacgccgggaggggtct

SEQ ID NO: 5264 - DNA, 624 bp, Zea mays
  misc_feature (575)..(575): n = any nucleotide
atgctttggggcccctcccgagggatactcctagagcggccgcggatctcccccgtccaagcctcggccgccgcgagcaggatgccaagggcgattgcgagctgcaggaggagcggcaccagcgagggggtgccgccgccatggtcggggaagggccggatggttgctctttcaacatattctatcagcgaggatggaaactacattgcttatgggctaagtgaaagtggtagtgattgggtctctattcatgtgatgagcattactaacaagcagcctatgcctgataaattatcctgggtaaagttctcatctatcagctggacgcatgacgggaaaggttttttctatggtcggtatccagcacctagaggaggggaagtggatgctggaactgagacaaacatcaatcttaatcatcagatatattaccatgttttgggatctgatcagtcagaggatatattgtgctggaaagatcccgaacacccaaagtattcctttggtgcctcagtcactgaagatggaaagtacatcatattgggcatctatgaaggctgtgaccctgtcaacanattatactattgtgaaattttcttctcttcctcaaggaaaagagggctt

SEQ ID NO: 5265 - DNA, 792 bp, Zea mays
atgtgggacgggctggagagcgcggcgaccgtggcgcagctggtcggtctcgacgtcggcggcctcatcaccatgatcgggcaggcggcgcggaaggctcggcagaacaccaaggactgcgagcacctagcccgccgcgtcggcatgctcgcggagctggtcccccacctgcaggacccggaggccaggcgggcggtggccgggctcaaagatgcgctcgtggaggctcaccagctcatcacatcctgccagaggagggggctcacgtcccagctgttctcggcgtccaggcaggccgacaggttcagggacgtcgagcgcaagatcgaaacctgcgtgtccatcatccctgtcatcggctacatcggcataacaagacgcctcgatggttcgcaatcccagtcccagctgtcggcgggaggggctgaggatcgggagttcacgctggcggagatcgccgtggccaccaacaacttcgccgtcgtgctcagcaacgacgccgacactggcaccaaggtatacaagggaaggctcctgcagaacgggcctgaggtggccgtcaagcgccttaaccgcccgccggggggagcggaagacaccttcttcgcggagcaagacattcctctcgccgctccgtcacgaccgcattgtcccgctcctgggcacctgcgccgacgaacgggagcgcatgctgctcacccagtacatgtccaaaagggtcgttccacgacacactggacgggcacacccctgttgtcccttgtggggtccgcccgtgaacaaggttcgacc

SEQ ID NO: 5266 - DNA, 330 bp, Zea mays
atgctgcccgccgagatccatatgggcgtcggcggacgtgccggcggcggcgtcggcggcggcctgtctcttgggcgccttcttcagcccgagcagctccttccaccggatgttcggcgcgcggggcacgcggccgtggcgctcgtcggcgcgcagctcctcgcgcagcgtcacgggccgcgcgccgccgcctgcctgctgcggcgcctccctaagcggcaggagccggcccttggagaagagctggtcggcggccatcatcgggtggctgccgacggagaactcgaagtcggcgtcccccggccccgccgcgcccccgcgcgcggccgc

SEQ ID NO: 5267 - DNA, 186 bp, Zea mays
atgtcgtcctccctctcggtggccatgcgcagaaggccgcgcagctgcgcctcccgccacgccgccggccgcgtcctccccgacgcgaagctcctccgcagccgctccctctcctccaccgccgtcgccgccgccgccgccgccgcctccgcgtccatgccgagcgacgcccgccgcgccgctagc

SEQ ID NO: 5268 - DNA, 444 bp, Zea mays
  misc_feature (42)..(42): n = any nucleotide
  misc_feature (102)..(102): n = any nucleotide
atgcactacctgcacgcggcgctgacggagaccctccggctntacccttccgtacccatcgacgtcaagtgctgcttttcggacgacacgttgccggacggntacgctgtcaagaaaggggacatggtgaactaccagccgtaccaaatgggcaggatgcggttcctgtggggcgcggacgccgaggagttcaggccggagaggtggctggacgacgccggcgtcttcgtccccgagagccccttcaagttcacggctttccaggcgggccctcgcgtctgcttgggaaaggaattcgcgtacaggcagatgaagatcttcgcggctgtgcttctctacctgttcaggtttgagatgtgggatgccaacgctaccgtgggttaccgggccatgctcaccctcaaaatcgatcgcccgctgtatcttcgtacgtcgctccggcga

SEQ ID NO: 5269 - DNA, 702 bp, Zea mays
  misc_feature (595)..(595): n = any nucleotide
atggagctcccttcactccaagatactgaatctgatccaaatagctggctcaagtatactgtggctcctgcaatgcagcctactgaattagtagatccttacctgcagtctccatcagcgaccccttcagtgaaatctgagtgtgcatcgccgaggaacagtggtcttttggaagagctgcttcatgaagctcaggcactaagatctgggaagaaccaacaatcatcggtccgaagttcaagttcttctgctggcacaccttatgagactaccacggtggttagcccagagtttgatatgggtcaggaatattgggaagaacagcccagttctttcctcagtgaatatgctcattttagtggaaattctttcactgaatccactcctcctgttagtgctgcgtcacctgatatcttccagctctccaagatttctcctgcacaaagcccttcaatgggctctggcgagcaggcgttagagcctaaacatgagtcggcagcttcacctcgtcctgaaaacttgaggcctgatgcattattctctgggaacacagccgatccatccattttcaataatgccatagccatgctcctgngcaatggcattgatgccgagtaccaacctgttcttggtgatggaattgtgctcgattcttcgtcatggaacaacatgcaacatgcttttcagatgccggggatcaaa

SEQ ID NO: 5270 - DNA, 603 bp, Zea mays
  misc_feature (526)..(526): n = any nucleotide
atggggcaggacggccagcagatccgccgcgacaagctcatcatcgacacggatcccggcatcgatgatagcatgacgatcctaatggcgttcagagcacctagtgtggaaatcattgggctcacgaccatattcggcaacgtcgacacaaagggcgcaacacgtaacgcgctattgctgtgtgagagagcaggatgccctgaagttccagtagcagagggcagccatgagcccctaaagggaggaaagccccgtgttgctgatttcgttcatgggtcagatggcattgggaatctgtttcttcctgcaccctctgctaagaaggttgaggaaagtgctgctgatttcctgattaataaggtctctgagtttccagcagaggtctctgtgcttgcgttgggacccctgacaaatgtagcattggccatcaaaagagacccttcctttgcaagcaaggttaagaaaatagttgtactgggtggagctttctttgcggctggaaatgtcaaccctgctgctgaagcanatatccatggagacccagaagcagctgacatagtttttacttcaggagcagatattcgttgtggttgggcattaaca

SEQ ID NO: 5271 - DNA, 426 bp, Zea mays
atggggggggcgcgttgttggggtgtgttgtacacttatatgaaaattggtttggttctgattactcatcgggcgagtcaaagacgccggtgtcctggtcaggcgaccactcatcggccacagcgcgccgcgcgtcggccggggccagcgtcgcggagccggagcggtcgacgtcgaccacgtccgcgttcttgcggttcagcgccgcctccacctgcgccgccgtcgcgtcgccgtggccctcccgctcggtggcgctgctgctcttgtggggggagctcggacgagctccttcgcgcctgcagcccgaggagagaagggcgagcccgtcctgaccggccgcacggcggccggcgacgagcgccgctctcgtggccatgtacaagcagcagtcgcgctgatcggcgaagaaggcgcaccggagac

SEQ ID NO: 5272 - DNA, 381 bp, Zea mays
atgctaggtggtgtcgagaagaatctaaaaaatggaactcacttgagaggagatataaacatgatgatggtgggagatccttcagttgccaagtcccagctcctaagagctgtcatgaacattgcccctttggctatctcaacaactggcaggggttcatctggtgttggtttgactgctgctgtgacttctgatcaagagactggggagcgaaggcttgaagctggtgccatggttcttgctgatcgtggtgttgtctgcattgatgagtttgataaaatgaatgatcaagatcgagttgctattcatgaagttatggaacagcaaactgtaaccattgcaaaggcaggaatacatgcctcactaaatgcagatgtagtg

SEQ ID NO: 5273 - DNA, 534 bp, Zea mays
  misc_feature (37)..(37): n = any nucleotide
  misc_feature (197)..(197): n = any nucleotide
  misc_feature (338)..(338): n = any nucleotide
  misc_feature (382)..(382): n = any nucleotide
  misc_feature (411)..(411): n = any nucleotide
atgaattcagaggagagtaggtgtccccgcaaggagntttgggtttgcaaaggaccccccacagagcccttttttttatatgtcaaggaagattttgcggttggagttaccgaccagaagcatacccctaattccaattttatcggccgtcttcttggcccaaggggaaactctttaaagaggattgaaccctccancagctgtcgtgttttcatcagagggaaaggctcaattaaagattctggcaaggaggaacaactcaagggaagacctggctatgaacacttgagtgaaccccctccattcttgattgaagctgagttacctgctaatgtgantgatgcaagacttgcaaaggcacaagagatccttgaagagctgntgaaaccagtggacgaatcacaagactantacaagagacagcaactgcgagaacttgcaatgctaaattcgccactccgagaggagagtccacatccaggtggtgctcctcctagtcccttcagtaacggcggcatgaaaagagtgaaacaa

SEQ ID NO: 5274 - DNA, 588 bp, Zea mays
  misc_feature (355)..(355): n = any nucleotide
atgggggagcgggacgcccgccacacgatttcatggagcactgcctgcccacctgggccgcaaccaacaaccgtgggtatctttccccaggccacgcggggtgggtacttccctccacagcctggtccccgggcgaagggcccttggaggagccccgaggcccgggagaacctgcagcgcctgtggcaggaagtaccgcgtcgacatcgcctttttcgcccacgtccacaaatacgagcggacctgccccatgtaccagagccagtgcatgcccagcgagaagacccactactcagggaccatgaacggcaccatttttgtcgtcgccggcggcggcggctgccacctgtccagntacaccacggccatccccaagtggagcatctaccgcgactacgacttcggcttcgtcaagctcacggccttcaaccactcgtcgttgctgttcgagtacaagaagagcagcgacagcaaggtctacgactccttcaccatcgacagggactaccgcgacgtgctcagatgcgtgcacgacagctgcttccccaccacgctcgccacctagttaataaaactaccacttattgg

SEQ ID NO: 5275 - DNA, 324 bp, Zea mays
atgctgaaattggaaaaggctgatgtatacaggttaccgtatctatccagtggcgctcctggattcgctttgcttgaagctgccaggaagatcaatttccaagatgtactaagtagaatttccgccggattttcgtccaacggttgggaaaaaccaatactgcttgcatggggaatatctgacaagtacttaccgctctcgatagctgaggaattcaagcaagctaatcctggcgttgtaaaactagaggcgatagaaggagctggtcacatgccgcaagaggactggccggagaaggttgtgaaggcgctgacatccttcctg

SEQ ID NO: 5276 - DNA, 291 bp, Zea mays
atgttggacctggcccctcaggaaaaggattgtcccaaaactcccaaaccctttgtaacttgggtagtttccctggtagccactcctttcccccgccctggtttacatgaggatggcctaaaaccatactcccctaggcgatatggtcaagcaaatgctgccatagagcaaccttggagatatttgtatcatccaatatacaattgccctgatgggattgcggaccataataaagcctatatagttgaatttccagacataagtcccagctcagttacttatccaggtttc

SEQ ID NO: 5277 - DNA, 534 bp, Zea mays
atggatgaggagtacgacgtgatcgtgttggggacggggctcaaggagtgcatcatcagcggcctcctctccgtcgatggcctcaaggtccttcacatggacaggaatgactactacggaggagaatcttcgtccctgaatctaaccaagctctggaacaggttcaagggcaacgacagccctcccgagcacctgggcgtcagcaaagagtacaacgtcgacatggtgcccaagttcatgatggcaaacggcgcgctggtccgcgtcctgatccgcaccagcgtgaccaagtatctcaacttcaaggctgttgacgggagctttgtgtacaacaatggcaagatccacaaagtcccggcaaccgacgtggaggccctcaagtcgaacctgatgggcctgttcgagaagcggcgcgcccggaagttcttcatatacgtgcaggactacgaggaggacgacccccagtcccacgagggactggacctccacaaggtcacaccagggaaagccatctcccattaccggatggaagga

SEQ ID NO: 5278 - DNA, 186 bp, Zea mays
atgaggaggcagcgaagcggttggacgcggcggagggcgatgaggagggagccgaggaagaggaggatgaggaggaggaggtggagagccttgtcggcatcagcgacgcgctcgagtcgctcgagcggcagctcgccgcccttcaggatctccagcaccaacaaagatacgaacgggaaaccatct

SEQ ID NO: 5279 - DNA, 282 bp, Zea mays
atggactcaacgctgaaccaggtgaaggaggagagccatggggagggaggagatttgatggcaggcacggtggaggccgcggatgggccgtccgcggccgtcgccgcggcaccaaagccgatggagggtctgcatgaccctgggccgccgccgttcctcaccaagacatatgacatggtcgacgactcggacaccgacctgattgtgtcttggagcgccaccaacaacagcttcgtggtgtgggatccgcacggccttcccacggtgctgctgccaggcact

SEQ ID NO: 5280 - DNA, 372 bp, Zea mays
  misc_feature (151)..(151): n = any nucleotide
atgtctccccacgggaacacccagtctggtgtctggtgctacgtcccccgtcaaaacctcgaatcgaggctcacatgtcaatggcccccctggtatccatcaaagcaagcattcctcggcggcaaactcgcctccacgaggacgttcaacnccaggtcgcactcctcgaatcgatggaaaggagtctttcgtcaggccaggagtcgtctatcctacgagcaatttggagcattcttagccaacatcaaagagctcaatgcccataagcagtcacgtgaggaaactctcaagaaagccgaagagatctttggtccagacaataaagatctgtacctgtctttccaaggcctgctgaaccgtagcatggtggca

SEQ ID NO: 5281 - DNA, 537 bp, Zea mays
atgggggccagcctgagcctggtgccggtgctcgactacttcgcccgccgcgagtgcctgcgcgccggcctccaccagaacgccgtcacgctcccgtaccccgacggcggcgccggggcgacctgcaccgtccagtactgggctccgcagggggagcctgagctcccgccgctcctgctggtccacggcttcgggccccgggccgactggcagtggcgctgccaggtggggccgctctcgcgccacttccacgtcatcatccccgacctcctgggcttcggcggcagcgcgtacccgtccgagacggcgccgccgccgacggaggcgacgcaggccgcggtgctggcggcgctgctgggcgcgctgcccgggatggagcgccggcgcgtggccgtggcgggcaccagctacggcgggttcgtggcgaactggctggcccgcgaggcggggacccacagggacgaacccgtgctgatccccagatccgaactgcatcaaaattatgccgcctatagggcgtataatgaatatcctcta

SEQ ID NO: 5282 - DNA, 600 bp, Zea mays
atgagtaacaggtatatccttacaggtgcagcatgggtaactgatgcctacaacaaggttgcaaccactacaactgatgctagcaagtcgataaaggaaaggatgatggctgagcaggagggagccaatcagagcggtgaaaccgcaaaagttgatttgcttgaaatctctgaagcggatgagcaagagtggaagcgccatgaagatgactctgcaaagaacgctgttcaagaaagtcctgaaatgacttgtcaggagagtgagcatcaggcgggtgaacgtcaaatgactaatgtagcaggtaactctaaaacgggtatagaggagcataaaaatcacgagggtgaaatagcagtagtagctcacatgcaagaaaacatggatacagctgagaagaatcctagctgccacgagagtgaagtatccaaggccaatgttcatgatagcgttctaatgacagagcaaagtgagcgagagcataatcaatgcgaaggtgaatttgcaaacagtcatgtcccaggaagccctgtcactattccggtcaccgtgtccactattgacgggaactctagcaacagtcccaagaagcctgattctgcc

SEQ ID NO: 5283 - DNA, 378 bp, Zea mays
atgtctgaggttgtcaccatcaagtactacgtgaggtggcctctgcaatgcaactcacgactcagtgcacatgcaagagtacttttccctgaaccactgagtcctgttatccatacgacacagcctttttgtcccagcaatttctgtctatcagattgtccaatcaagcaattgtgccataaaatattagtcgatttcccaatgtttgacattacaggcttctccttcactgggctgtgcggggcatccccgtggcgctgctccattccgccgccgccgccgcacccaccgcccaatgccgcggtggcagtgcgtacgcgcaccgcggccctccccctcgcggcgcccactatcgctggcgagacccgcggaagagtg

SEQ ID NO: 5284 - DNA, 558 bp, Zea mays
atggcgcgccgacgccggcggcgcggagaaggcggagcgcgcgctgggcgcgaacgccgcggcgcgcggagccgcgtcgtagccactctggtagaagcagggggcggcggcggagccgagggacaggtcggtggtgcaggtggacgcggtctcgtcggactcgccgccgctgtgcgcgcgggtgtccgctgccgtgtactgcgcgtgagcggcggcgacggtgcgcggaggcgagccggcgtggtgctggtggtggtggtggtggaggacgacgacgggcgccaagtgcgacgtcggcggcgccgggtccggcgaggacgagggtttgcgccggcggagcgcgccggtgtgctcccgctgcttgcgcgccatgaggacgtgccagtggttcttgacggcgttgtcggtgcggccggggaagaggcgcgcgatgagcgcccacttgttgccgtacgcgcggtgcgccgccagcagccgctcctcctcctcgccggagaaggcccggcggttgatccgcgggtccagctggttgaaccaccgcaggcggcagctcttccc

SEQ ID NO: 5285 - DNA, 450 bp, Zea mays
atgcatgccgactgtcaaatgaaggctgcatgcacgtcgccccccgcaatcacctcgatcgaccgactgtcaaatgaaggcctggaggaggccctcgcgcagcgcgcgctgccactgcggcacggccgggcggaacaccagcgcgcgctccacccagcggtaggacgcgttgacgaggcggtggtcccacccggcggcgcgcacgtagccaccgctggcacgggtgtagaagccggcgttgaggcagctgccgccgccgagcacgcgcgcgcgggcgttcacgacgccgtcctcggagacgaaccgctgcccgtgtccgtgcgaggtgaatcgaatgggcgacaaaacctattgcagcaaccctcgctcaccaccggcattcgcagcttaattaccttccggcgaggcggtgaccacggtaatgcaagaggagcccagaaggacggtgcc

SEQ ID NO: 5286 - DNA, 108 bp, Zea mays
atgttggtgcggctactgttgagtatctttacagcatggagactggagaatactattttctggagcttaatccccgactacaggttgagcatccagtcactgagtgga

SEQ ID NO: 5287 - DNA, 159 bp, Zea mays
atggtacgatcgttcaccaactgcacattgcacaactctggacttctcaagcaaaaatgtttgaatcatggcaccacatattcttccagtggtactgaaatgaatttcgataagctttccctgcaattgagaataaagattgatcttcattcgaagctg

SEQ ID NO: 5288 - DNA, 741 bp, Zea mays
  misc_feature (466)..(466): n = any nucleotide
atggcgcgcaaggtcctgctgctggtggctgccgtagccgcgtgcctcgccgcgacggttcgcgcggggtggcagaggggctcggcgacgttctacggcggggccgacgcctccggcacgatgggtggcgcgtgcgggtacggcaacctgtactcggcggggtacggcgcgagcacggcggcgctgagctcgacgctgttcaacgacggcgcggcgtgcgggcagtgctaccaggtgcagtgcgaccagcagaacagccggtggtgcaagccgggcgtggtcgtcaccgtcaccgccaccaacctgtgcccggccgactactccaagcccagcaacgacggcggctggtgcaacccgccgcgccagcacctggacatgtcccagccgtcctgggagaagatcggcgtctacagcggcggcatcgtcccggtcttcttccagcgggtgtcgtgctccaggagcggcngggtgcgcttcaccgtcaacggcaacaggtacttcaagctggtgctcgtcagcaacgtgggcggcccgggctccgtcagcgccgtgcagatcaagggctcctacacggcgtggatcacatgtcacggaactggggcgccaactggcaagaccaacagcgacctcaccggccagagcatctcctcccgggtcaccgcgccccaacggccagtttcttcagttagacaacgtccccggctctggctggcagctggcccagaccttccccaacggcaa

SEQ ID NO: 5289 - DNA, 681 bp, Zea mays
atgctgggcgcgcgtgtgcagctgaaggggtggcaacaggcagctgttgcatttggttctgcgtttggggccttgcttgaccctaggagggctgatcttatagctgctcttggagagactactgggaaaccagcgtttgagcgtgtgctgcaacgaatgaagaacagtgcagaaggcagggaagttctctcggagcgtccccgcgtggtatcctcgcaggtttcccatgcctgggacctgcctcagaacacatttggcgcggcgtatgctcagttcatgggatcaaggaacttctcaccagacgatcgcccacctgtccgtttcatggacaccgatgagctcgcctacgtcgcgacacgtgctcgcgaggtgcacgacttttggcacgtgctgtttggtcttccgacgaacctgattggggagaccgccctcaaggtgatagagtttgaacagatgttcctcccaatgtgcatgctgtcagtcgtcgggggctctgcgaggttcagcgacaaacaaagggcgctgtttttccagcactacttcccatgggcaacaaaagctggtctcaagtgtactgatctgatgtctgtatattacgagaagcactttcacgaagacctggaggtagtgagaaggaactggggaatccttccttgccccagtcccaaaaagagcagtgta

SEQ ID NO: 5290 - DNA, 564 bp, Zea mays
atggcgtcgccggcgcggcggctcctgcagaccaactccgtgcagtacccgacgctccccgcggccgacccgccgagcccgctggccgtcgactccgacgtggtggtcatcctcgccgcgctcctatgcgcgctcatctgcgtcgtggggctggcctccgtggcccggtgcgcgcgctcccgcgccgcgcccgccgccgccaggagggggctcaggaagaaggcgctcagggcgctgccgagcctcgcgtacgaggacgccgtggcggcccgggccggggacggggcggcggaggtcctggcggagtgcgccatctgcctctcggagttcgcgccacgggaggaggtccgcgtgctgccgcagtgcggccacgccttccacgtcgcctgcatcgacacctggctcgccgcccactcctcctgtccctcgtgccgccgcgtcctcgtcgtcggcgacgccgccagtaagcgcccgccccagcctaagcgctgccgcaagtgcgaggcggccatggacgaaccctcctcgtcgtccggttccgccggcgacacggctaccggttcc

SEQ ID NO: 5291 - DNA, 450 bp, Zea mays
atgctatggaagtcgtcatcctccgtgtcggccttcgccttcagctccgcgctccggacgatgacctcgatcctcgccaccacctcggccatccgaggccgccggtccggccggtcgtcggtgcattccacggcgagctgcagcagccgcaccatctcctcctccacgcgctcctcgaccgcgatgctggcgtcgaacacctcggccgtccactcctcctgcaccaccgtgcgcacccacagcggcagctccacgccgccggtgctcccggggaccgagttcaccggcggcttccccgtcagcgcctcgaggagcagcacgccgaagctgtacgtgtccgtctcctgcgacgccctgcgcgggtcggtgacctcgggggcgcggtacccggtgacgcgcttcaggggcacgtgcgcgccgacgagccggaggatgccgtggtcggtcacg

SEQ ID NO: 5292 - DNA, 765 bp, Zea mays
atggcggtggtgggcgtcctcgcgctgcagggatcctacaacgagcacatggccgcgctgaggaggatcggggtgaagggggtggaggtgcgcaagccagagcagctcctcggcatcgactcgctcatcatccccggtggcgagagcaccaccatggccaagctcgccaactaccacaatctgttccctgcacttcgagagttcgtcggaggtggaaagcctgtctggggaacctgtgctgggctcatctttcttgcaaacaaagcagtagggcaaaaaacaggggggcaggaacttgttggaggattagattgtacagtccaccgaaacttttttgggagtcagcttcaaagctttgagacagagctttccgtgccaaagctttcggagaaggaaggagggaatgatacatgccgcggtgtatttatacgggcacctgctatattggaagtaggtccagatgttgaaatattggcggattgccctgttcctgttgacagacccagcattacaatatcatttggggagggtactgaggaagaagagtattcaaaagatcgggtaattgttgcagtgcggcaagggaacatcctcgcaactgctttccacccagaattgacatcagactccagatggcatcgtttcttcttggacatggataaagaatccccagcaaaggcgttttctgcgctctccctgtcgtcatcgtcaagagacactgaaggcctgccaaagaataagccgtttgatctgcccatttttgag

SEQ ID NO: 5293 - DNA, 861 bp, Zea mays
atggcctcccccgacctgctcttcaatctgcggaacctcttctacctgggcgcctaccaggcagccatcaacaacagcgacgtcccgggcctcgacgccgacgccgccgctgagcgcgacgccatcgtcttccgctcctacatcgccctcggctcctaccagctggtgatcagcgagatcgactcgtcagccgctacctcgctgcaggccgtgaagctgctcgcgctgtacctcactggagacaaggaaggtgctatctccagtctcaaggaatggttgagtgattcagcaattggaagcaatcctgttctgcggttgattgctggaattgtatttatgcatgagcaggactacaatgaggctctcaagcacacacactctggaggaactctggatttgcatgcattgaatgtccagatcttcatcaagatgcatcgttcagactatgctgagaagcaattgaagatcatgcaacaaattgatgaagaccatacacttacacaacttgcaaacgcatggctgggcattgctgttggtggctctaagatccgtgaagcttatctcatattccaagactttgctgaaaagtacccaatgacagggatggttttaaacgggaaggcagtctgctgtatgcacatgggaagctttgaggaggctgagactctgttgcttgaagcgttgaacaaggacgcaaaagatcctgaaactcttgcgaatctaattgtatgtaatctccacttaggcaaaccatcatcacgatacctcagccagctgaagctatcgcatcctgaccatgtgctagttaagaatgcggcagcatcagaagcgaccttcgagagggccctccaagccgttgct

SEQ ID NO: 5294 - DNA, 342 bp, Zea mays
atgcgcgggggcaggtggtggtactggtgcaggtgctggcacggcggcggcggcggcggcggcaggagcggcgactacaccgactgcgcgtaccactcgtcctcggtgcgcagggacgacgcgcgcgaccggggccgcgccgtgtcctctccacgattcttggggctccggtcgtacccgcctccgtacgacgccgactcgatgctcgcggacaagcgccggctgtacgccgccacgccgtgctcgctgcgcgtgtcgtcaccgtgccgctcttgcagcgagaagcgcgcgcggacgggagggtggtggtggaggggcgggagcgcgggtagcgcgcggctg

SEQ ID NO: 5295 - DNA, 390 bp, Zea mays
atgacacacacacacatgcttcacaagattcaaatacaaaatacaatcacaccacgtcgagggttgcatagatttagctcgacgtccttattcatctttgcactacacacatgcatgcataaacatgcatggcttggccataaacatgaacatagatacggctacctccaccatcccagaatgattgaaacgattgaaacagagacaagtgatgagcaacaaggcaatctagtttcctccacccccacctcctcctccagtaccaccaccaccaccgcctccaccgccgccacctccgccgccgccgcctcctcctcctcctcctccacctccacctccaccgccccctccacctccgagagactggtggagttgctgagcaagtatcct

SEQ ID NO: 5296 - DNA, 255 bp, Zea mays
atgcctctcctcagtattcctattatttccaccttgaccactgtacacgagcacatctgtgtcatcatcctcattctcataacctcctgcagagacaatacatatggctacagaatcctcatcttttccaaatttagtagtcatgtaatcaatgcctcccatactaggtgcatgcaacccaatgacacacagctccatcctaaaatagaaaatatctcctatttcaactccaggtacagttcctaccctcttgcc

SEQ ID NO: 5297 - DNA, 303 bp, Zea mays
atggacttcctgcccgccggcgacggctccgggtgccccaagggcgggccgcgctgcgacgccgacgtcacgtcgcagtgccccgccgcgctgcaggcccccggcggatgcgacaacccctgcaccgtgttcaagacggaccagtactgctgcaccggctcggcgacggacaactgcgggcccaccgactactccaagttcttcaaggggctctgcccggacgcctacagctatcccaaggacgacgccaccagcacctacacttgccccggcggcaccaactacaacgtcgtcttctgccca

SEQ ID NO: 5298 - DNA, 381 bp, Zea mays
atgatagtacttgcagaaccagctcctggagatatggtaagagctgtcaagaaagccatcgacatgctacctggaatagacccccagattatgcatcttcggatgaaagaactttatagttgggacgatgttgccaaaagaactgagattgtttatgatcgtgcaatggaatctccaacaacaaatttactagatcgccttcctcggtatcttacttgtggatcttgggctggaaaactgttttgcctagttatgatcatcaattacctactatggcgccttttagaatttctacagcctgctgtaggtattgaagaagtcccagatatagggccactacatgctcatttaggttcaaggaatgatgaggctcaagagaag

SEQ ID NO: 5299 - DNA, 507 bp, Zea mays
atgggctacgaccattctgctgtgaacaaggaaatcgggtcagcatcgatcacaggcggatatgtgtaccgaggttccgctgacccctgcttgtacggaaggtacctctacaccgacctgtactcatcgctgatgtggacgggcacggaggccccagaggggagcgggaactacacgtcggccgtgaagccggtgagctgctccaaggcctccccgatcggctgcgagtccgtcgccgggagcacggacccgctgctcgggtacgtcttctcgttcggggaggacagccgcaaggacgtcttcgtcctggcgagcaagggcgtgtaccgcgtcgtcaggcccagcctctgcggctacacctgccccgcggagagaccggcgaccgacaacggcaccgcgccaggtccaggcgggccgtcgtcgggcgctcccgccgcgacacggctagggaggtcggtggcggcggtagcggtagctctggcgttgatcccgtgtgtgctgttactg

SEQ ID NO: 5300 - DNA, 324 bp, Zea mays
atgccgatctccccggacagctcgttgttgtccacctcgacgtcggtcagcgacgtgcagttggagagctccggcgggatgacgccggtgagcttgttggtgctgagctgcagctgctgcaggttcggcagcgtgccgaagctgctcgggatgggccccgtgagcgagttgagcgacaggtcgatgagcacgaggtccttgcagttggcgatctccggcgggatagtgccgacgagctggttctgccacagcagcaccgtctgcagcttgcgcagctggccgagctgcggcgggatgggcccggagagggagttctggtacagg

SEQ ID NO: 5301 - DNA, 366 bp, Zea mays
atggcgcccgagttgctctccttcttctcgaccatcacggcgttcaacctcatcctgatctactccatcgagctgttcccgacgtccgtgcgcaactctgcggtggggctggtgcggcaggcgctggtgctgggcggcgtggtggcacctgtgctcgtcgcgctcggccgcgaacggagcttctggtccttcggcgtgttcgggctctgcatcggatgtttggggctctttgccgcctgcctccccgagacgagggggcggagcatgtcggacaccatggaggaggaggagcacaaggaggccgccgccgcggcttgcaccggcgcaaccgacattgccacgaaggatgataccgacctgctcgtg

SEQ ID NO: 5302 - DNA, 603 bp, Zea mays
atgggttcacccttgttcccccgacccgggttggtcctgttcccccacggacccttccagccagggcggacccggaacccggaccgagggccccggtgcacaaagttggggcccttcagcccttcgttagtacttgcgccactgggaggacatgggacccagcgctttcccggtgcagaaggtccacaagatctgcgtgctggacatacgcttccccaacgccgatcgccacgcccgaaacatactcgtccgcaagcacgacgccggcggagcgggaggcatgtcgctgttccccatcgaccatggatactgtctgccggagagcttcgaggactgcactttcgagtggctctactggcctcagtgccgggagcccttcagcgacgagacggtggagtacgtgcggtccctggacgcggaggaggacgtgactatgctgaggctccacgggtgggaggtgtcgcgcgagtgcgcgcgcacgctgcgcgtcgccaccatgctgctgaagaagggtgtggagaggggcctcaccgccttccacatcgggagcatcatgtgcagagagaccctgaccaaggagtccgccatcgaagagatcgtccg

SEQ ID NO: 5303 - DNA, 618 bp, Zea mays
atggggcggccgccctgctgcgagaaggcgcacaccaacaggggcgcgtggaccaaggaggaggacgagcgcctggtggcctacatccgcgcgcacggcgaagggtgctggcggacgctgcccaaggcggcgggcctgctgcggtgcggcaagagctgccggctgcggtggatcaactacctccggcccgacctgaagcgcggcaacttcaccgccgacgaggacgacctcatcgtcaagctgcacagcctcctcgggaacaagtggccgctcatcgccgcgcggctcccggggcggacggacaacgagatcaagaactactggaacacgcacgtccggcggaagctgctgggcaggggcatcgaccccgtcacgcaccgccccatcgccgccgacgccgtgaccgtgaccaccgtctcgttccagcccagccccagcgacgccgccgcagcagcagcagaaaccgaggtgacggccgccaaaggcgccagatgccccgacctcaaccccgacctctgcatcatcccgccgtgcccgcagaaggaggaggaggaggcggtggacctccaaccctccgccgccgtcgtcaaccggtaccgtctggcgggtacgcccctc

SEQ ID NO: 5304 - DNA, 132 bp, Zea mays
atggcggcgttggtcatgttggcgcggacgccgttgcgcttgcacagcgcctggagctcccggcgcgagagcgtgtggaaatccatggccgtcgccgcctccatctccctcacgtctcttaccttctcctcc

SEQ ID NO: 5305 - DNA, 570 bp, Zea mays
atggtcggcaggggcagcctgggcaccgtgtaccgcgcggtgctgagcgacggccgcatggtcgccgtgaagcggctgcgcgacgccaacccctgcgcgcgcgacgagttccaccgctacatggacctcatcggccgcctccgccacccgcacctcgtcccgctcagggccttctactacgccaggcaggagaagctcctcatctacgactacctccccaatggcaacctccacgatcgcctccacggtcacaagatgtcgggagagtcggcgctggactggacgacgagggtgcggctgctgctgggcgcggcgcgcgggcttgcgtgcatccaccgggagtaccgcacgtccggcgtgccccacggcaacgtcaagtccaccaacgtcctgctcacaaggacggcgcgggcgcgcgtggcggacttcggccctcgcgctcctgctcagcccgggcgcacgccatcgcgcggctggggggtaccacgggcgcccgagcagcaggacgacaaggcgctggtcgcagaggccgacgtgtacagctttcgcgtgctggtccctggaaggcgc

SEQ ID NO: 5306 - DNA, 444 bp, Zea mays
atgcttagtctgttgcaccatgacaatctagtaaacttaattggatactgcgctgatggagaccaacgtcttcttgtatacgagtttatgccattgggatcacttgaggatcatttgcatgatattccacctgataaggaacctctggactggaatacacgtatgaagattgctgctggtgccgccaagggcttagagtacttgcatgataaggcaagtcctcctgttatttacagggatttcaagtcctcaaacattctactcggtgaagggtttcatccgaagctatcagacttcggccttgccaaacttggccctgttggtgacaagactcacgtttcaacacgtgtcatgggaacttatggctactgtgctccagagtatgcaatgacagggcagcttacagctaaatctgatgtatataagttgtggtgttgtgttcct

SEQ ID NO: 5307 - DNA, 453 bp, Zea mays
atgaagaccgtatcagtggggaggaggaggttcagtgcagagttccagctagtgttccggctgatcaagggtctcatatttataacttttacagccatcgtggtaatcctaatagcaatccctggcatgacggttctggacatctttgtttgcatccttgccttcatgcccactggatggggtttgctcctgattgcccaagctatcaggcctgtgattcaaaagatcgggctgtgggggtcgatcaaggctcttgcccggggctacgagatcctaatggggcttctcctgttcacgcccattgctttccttgcctggttcccgttcgtgtccgagttccagaccaggatgctgttcaaccaggccttcagcagaggtctgcagatctcccgtatcatgggaggacacaagaagaccgagggacgcggagcaaggagtagtagggctgctgat

SEQ ID NO: 5308 - DNA, 720 bp, Zea mays
atggcgagctctcagtgctgcgataacccgccggccctgaacccggcctgcggggagggcaaggtcgtcgacagcttcggcgggctcaaggcctacgtcgccggccccgaggactccaaggccgccgtcgtcctcgtcgccgacgtcttcggattcgaagcgccgattatgaggaagatagccgacaaggttgcttcgtcagggtactttgttgtggtaccagatttgtttcatggggatccttatgcacctgagaatgttgagaagccctttcctgtgtggataaagtcacatactccggaaaaagggtttgaagagacaaaacaagttattggggctctaaaggagaagggagtgtctgctgttggagctgcagggtattgctggggtgcaaaggttgttgtggagttggcaaaagctcatgagatccaggctgctgtgctgttgcacccttcttttgttaccgttgacgatatcaaagaggtcaagtgcgcaatttctatcctcggagctgagattgacaaaatgtccccaccggagctaatcaagcagttcgagcaggtcctttctttgaactcaggggttggccacttcgtcaagatcttccctggtgtggcgcatggatggagcgtgagatacaaccacgacgacgcagctgccgtgaagagtgctgaggaagcctttgcggacatgctcgactggttcaacaagaatctgaaa

SEQ ID NO: 5309 - DNA, 618 bp, Zea mays
  misc_feature (560)..(560): n = any nucleotide
atggactggagcgcggtgacggcggaggacttggtggacgcgctgcgggaggtggactggtccatgccgccgcggcctgtcccggagttcttctcccgcttcaccgtcccacgctcctactccaagtggaccagccgcctcaagtgcaacctctactactacaggacaaactatttcatcttgatcatgttcatccttgggatgggcttcctttggaagccagttgctatagttgctgcttttatgactggacttagcatcgcatttctcaatgatagttttgcagtcactttcaatgagaaagtcacaaggaccgtaagacaattttcaccacatttagctgcaaagttgaggccacctataactcctgttcttcgcggtcgaccaagctctaagagatcaattcatatttgtgggcgacctcgctgggtgtttgtcctgttcttttctgcagtgagctgtatactctggttgacctcatgcagtcttctcacagtcctctgggcacttctcattgctctatttgcaactgtgctccatgcaagcttcagaacaccaanatctcaaagcacgtctgaatacattcagagaggaattccgggctgtttggcggaatta

SEQ ID NO: 5310 - DNA, 621 bp, Zea mays
atggtggaatccgtggcgccgcggctgccgaacgtcactttcctcgacatcagcagctgcacgaagatcggggcccgcgggctggaggcgttcggcaagcactgcaagtccctggcggggctgcggcgggtgatgcacccgatcgacctggcggacagggcgtgccagcacgacgaggcgcacgccatcgcgtgcagcatgcccaggctgcggcacctggagatggggtacatgctggtggcgacggaggcggtggcggagatcctggggcggtgccgcgagctcaggttcctggacctgcgcggctgctgggcggtggacgacaagctcctgctgcgcgaccgccacccggggctgcgcgtcctgggaccccgcgtcgacgactgctacgagaacagctactgggaggagtgctccgacgactactcggacgactcctccatctactcgtgggagctcatggacgacgtcgacgacgactacgactacgccgccgccggcagcgacgacgacgaggccgtctgggacgacgacggccagggcctggagaacctcgaggtcaggttctacggcggtggcttcggcgagaccttcgccggcttcgactggccgccgtcgccg

SEQ ID NO: 5311 - DNA, 147 bp, Zea mays
atgccaagagccccgagagcagcagctccggctccgcctccgcctccgcctccgacgacgccagcgccgcctcgccggcggcgccgcaggacgccgagcccaacccggacgacgcgctgttcgacctcccggacctgcttctggacc

SEQ ID NO: 5312 - DNA, 324 bp, Zea mays
atggagtcgacgccgcggatggtggacaggcggtgcgccaccagcacggcggtgcggcccttcatgatgcgctccagcgcctcctgcagcacgcactcggactcggcgtccagcgcgctggtggcctcgtccagcagcagcacggcggggtccttgagcaccgcgcgcgcgatggcgatgcgctgcttctggccgccggacagctgcaccccgcgctcgcccacgggcgtcctgtacccgtcggggagcgcgctgacgaagccgtgcacgttggccaccttggccgcctccacgacctcctcctccgtcgcgccgtccctgccg

SEQ ID NO: 5313 - DNA, 396 bp, Zea mays
atgccgtcatcgtcctccgagctgaggagctcagggagctggtggtgctgcttgttgccgccgtgctggttcttgaacgccttgaggccctgcacgaggcccccaccaacccctcctcctcctccttgcttcccctggtcctttttctggccgccgttgttgttgctgctcttgctgtgcccatccttgctcggattgccaccttgcttctgctgctgttgctgctgggcctgctgcttctgctgggcactgccgcccttgtgctgcgaccacagctccgcgtgcttgccgcccctggtgagcttcctgatcaaggtctccgagtccacgtcgcctgtcaccgacaccttgtggttgtccacatcaatggccaccgagtacacgccttcgatcttc

SEQ ID NO: 5314 - DNA, 468 bp, Zea mays
atggacggttcgaagagcaatgctcaccaacaaggcgcggcggtgactagcaccaccagctcggcgggcaagcgcaagggaaaggcggcttcatcttgcggcggcggaaagaagccacctatcaaggtggtgttcgtcggcaaccccgtgcgggtgaagaccagcgtggcgggcttccgcgcgctggtgcaggagctcaccggccgccacgccgacccgtacaagcacagcgttggcgacgccgacgccgacgacagcagcagcggtggcagtggcagcccggtggagctgcaggtgggcggcgcgctgtcatcggactccgcctctgctgccggcgtggcccaagtcatctcagtgccggcttacgacgacgacgacgacgacggcttcgcgccacagctgatcgacaacagctactccgtgttctcgccgcccacgttcctttacggcccgcacggcggcgagctg

SEQ ID NO: 5315 - DNA, 315 bp, Zea mays
atggtgaacgttcctaagaccaagaagacctactgcaagaacaaggagtgcaagaagcacactctccacaaggttactcagtacaagaagggtaaggatagcctgtctgcccagggaaagcgccgttatgaccgcaagcagtcaggatatggtggccagaccaagcctgtcttccacaagaaggccaagaccaccaagaaaatcgtattgaagctgcagtgccagagctgcaagcactactcacagcacgcaattaagaggtgcaagcattttgagattggtggagacaagaagggcaagggaacatctctcttc

SEQ ID NO: 5316 - DNA, 117 bp, Zea mays
atggaacaggagggttacaggatcctaggcaactccggcgaccaatggagcgacctgctgggatcttccatgagcgctcgctctttcaagctccctaacccaatgtactatatcccg

SEQ ID NO: 5317 - DNA, 258 bp, Zea mays
atgaatgactggtggtatatgtatgcaaacactgccataaccatttggcaatccattctatcagtaattccaccatgcccaggtatgctgtcaccaaaatcctttattttgaaagccctcttgaagccactcgcaaaaaatcctccgaatggtgctattattgacgcaaataaacctagggctaaagcatgccactgcacaggcataatggctagatctttccatgggaaccaatgtggcaccgactctcccaatgag

SEQ ID NO: 5318 - DNA, 555 bp, Zea mays
atgaaaggcgccgtcatcggcgcatcgaccgtcctggtcgtggcggtggtggccaccatctgcgtcgtttccttcaaaggcagcggcgatggcgggagggccgaggagggcgagatgtccacgtcggtgaagtccatcaagtccttctgccagcccgtggactacagggagacgtgcgagaaggcgctggaggcggcggccgggaacgccaccagccccacggagctggccaaggccatcttcaaggtgacgtccgaccggatcgcgaaggccgtgcgcgagtccgccctgctcaacgagctcaagcacgaccggcgcacgtcgggcgcgctccacaactgcggagagctgctggactacgccatcgacgacctccggacgacgttcgacaggctcggcggcttcgagatgaccaacttcaagagcgccgtggacgacctccggacgtggctgagctccgcgctcacgtaccaggagacgtgcctggacgggttcgagaacccacgacgcccgccgcgggcaagatgcgcaaggcgctcaacagctcgcaggagc

SEQ ID NO: 5319 - DNA, 240 bp, Zea mays
atgcctaatgccaaaccattgggccttggccgagcaggcactacaatcgacagagatgaacacaagcgctttgtgagggaagttcacgaggaagtaactgaggcaaggcagaaggcctcaacagtaagatctcgacgacaagagcaggatgctgctcgtagagagaaactcaggcaagcttacctgaagaaacgattggagaagttgattgctgaaaaacaggcctcttcaaccagtgat

SEQ ID NO: 5320 - DNA, 765 bp, Zea mays
atgtcggtctcggcgtcgtcaccggcggcggcggcgggcgatgagaagcaggaggcggcgcccgtcaggcgctgcaagggcgtcaacgacctcgacaaggtcgttctccgcgaggtccggggcagctccgcagaggtgtacttgtatggtgggcatgtgacatcatggaaagatgagcatggagatgaattactttttgttagcaataaggctattttcaagcctccaaaagctatacgtggaggaataccaatatgctttccgcagttctccaactttgggaatctggaaccacatggatttgcaaggaataggacatggagtgttgatgatgatcctccaccatttccagtgccaacctccaatagcgcttatattgacttgatcctcaaacctactgaagatgatttgaagatctggcctcatagttttgaataccgcctgagggttgcacttagtcctggtggtgatttgatgctaacttcacgtataagaaacactaatgcagacgggaagccattctctttcacttttgcataccacacatacttcaagatttctgatatcagtgaggtgcgagtagaaggattggaaactctggattacctagacaacttacaagatagagctcgttccactgaacaaggcgatgcaatttgttttgaatccgaactggacagaatatatctgggcacaccatcgaaaattgccattattgatcatgagaagaaaagaacatttgttgtgaggaaaggaggcccttcc

SEQ ID NO: 5321 - DNA, 435 bp, Zea mays
atgccaactaaaccaattattgatgatccagccattgttgagcagaacaaggaaaaggtattcgaagaatggaaatctatgcgcagggctgagctgactcggtttcaaaagcaagttgaggagcaatatctctcaaatgtggagaggcaattggagaggatccagaatgcccggaacgctcggaaggcgaatgggcctggtaacatgcaagaaatggacaaggagctggacacccacagggcggagcatggtccaaagcctcggcgagttcccgaggagggcggcaatgatgatgacgaagatgcagaggacatggctgcggaagacgagctgatggatgaagttttgggcatcaacgatgcaatcaatgaggacccatccaagccgtccgaagaagctactactgaaggtcagccagcaaccgaggaagcacaa

SEQ ID NO: 5322 - DNA, 831 bp, Zea mays
atgtacctccgttgtttctccggcgaccggccgcgggactggttgtggtggctgccttgggcagaatatacatacaacacagcgtaccagtcttctctacaggagacaccatttcgggtggtatacggtcgcgaaccgcccaccatcagatcatatgaagtaggggacacgcgcgtggctgctgtggcccaaacaatggccgaacgtgaagaattcttggccgacgtccgtcaccgcctagagcaggcccaggcaatccagaagcgctactacgacaaagctcaccgccatgtctcctatgccgttggggactgggtgctcctccgactccgtcagcggccggtggcttccatttctcaggcgccgaggagcaagcttcagccccgcttctttgggccgtaccgagtcaccgagctcatcaatgaggtggttgtacgtctcgagttgcctccacgcgccaagcttcatgatgtgttccatgtcggcctcctcaagaaatgggtgggcgagcctcccgcgacaccaccaccgttacccgctgttcatcatggagccatcgaccctgagccggaacgtgctgtacgcactcgcatcgctcgcggggttcgacaggtgctcatccgctggaagggagaacccgtagcttcctccacatgggaagatctcgacgccttcgccgccaagtacccagcgttccagctcgaggaagagctggtgatcgagggggggagagatgtcatgtacggcatcccctactccaggcgacgtcgcgcccgcgacgtacgcagggcggccgagcgtgcagcacaggaggcggctgcccaaaccaac

SEQ ID NO: 5323 - DNA, 198 bp, Zea mays
atggcaagcaaaaggattcagaaggaactcatggatctccaaaaggacccaccgacatcatgcagtgcagggcctgctggagaggatctattccactggcaggccacaatcatgggtcctagtgacagcccctatgcaggcgggttttctttattaatatccattttcctcctgactacccctttaagcctccaaaag

SEQ ID NO: 5324 - DNA, 426 bp, Zea mays
atgccgaagaacaagggaaagggaggcaagaaccggaagcggggcaagaacgaggcggacgacgagaagcgggagctggtgttcaaggaggacgggcaggagtacgcgcaggtgacgcggatgctgggcaacggccgctgcgaggcgctctgcatcgacggcaccaagcgcctctgccacatccggggcaagatgcacaagaaggtgtggatcgccgccggggacatcgtgctcgtcggcctgcgcgactaccaggacgacaaggcggacgtcatcctcaagtacatgaacgacgaggcccgcctgctcaaggcctacggcgagatccccgacaacgtcaggctcaacgagggcgtcgttgatgaggaggaagccggcgcgcaggatgactatatacagttcgaggacgaggacatcgacaagatc

SEQ ID NO: 5325 - DNA, 1143 bp, Zea mays
atggacggccgcatcgacggcgtgcggctggtgcacagcacggcgacgcgcagcacgcggactgcctcctccctggcccacccttccacgatgcccgggtccaccagggacatcaccttctcccggctctccagccgccgcgacacccagtccaccaggtcccggctctccaccaccgccggccgccccgtcaccagctccagcagcaccacgccgaagctgtacacgtcgctcttctccgtcaccttgcacgtgtacgcgtactccggcgccatgtaccccagcgtgccggccacgacgccggcggacgagtggccgccgccgccgcctgccgagctgaggatcttggcgagcccgaagtcggcgagccggggcttgaacgactcgtccaggaggatgttgctggacttgacgtcgcggtggaggatggggcggtcgcagccgtggtggaggtactcgaggcccctcgccgcgcccaccgccacgtcgtgccgctccacccacccgagcgcgcccatcttccgccccgccgccccgtgcagccgctcgtacaggctgccgttggggaggtgctcgtacaccagcaggctcgccgcgccgtccgcgctggtgatgctgcacagcagcttcaccacgttcacgtgccggatggcgctcagcgtccccacctccgagtcgaactcgcggcaccgcaccgacgccgccggccgcagcatggcggcggacggcgccgtgctcgtcgccaccccccgcgtgacgtgcttcacggccaccaccgcgccgttgccgagcttcacgcggtacacgttcccagacccgccgctgccgaccaggttctcgtcgcggacgccctcgatgatctcccgctcgtcgaacgccaggatccggaacgacttgaggtcccacgagcccttcttggcgaacagcttccccgcggaggcctccgcgcgccgccgccgccgcttctgcaggcacatggccacgcccgcccccgccagcagcaccgccgtgacggcgaggatgcacgtcacggccaggcgctccgcgttcgccgaccggctcccggagctccgaccgcagcggcggaggaagacagcgccgttggtggcacacagcccggggttcccgtcgaagctctcgccg

SEQ ID NO: 5326 - DNA, 1299 bp, Zea mays
  misc_feature (765)..(765): n = any nucleotide
atgagagctcttaactatggtgttgacatagtggtcggaacaccaggtcgagttattgaccttctgagaaggggtgttttaaacctttcacagatccagtttgtggtcctagatgaagctgatcaaatgctggctgtgggtttcgatgaagatgttgaggtgatcatggagcaattgccacagaatcgtcaaagcatgctgttctctgcaacaatgcctagttggataagaaaaatttcgaacaagtacttaaaggatccagttataattgaccttgttggtgactcagatcagaaattacctgaaggaatctctctctattccattgcctctgataacttcgggaagccttcaattattggtcccttgattaaagagcatgccaatggtggaaaatgcattgtgtttactcaaactaaacgggaagcagatagattggcatatgtcatgggaaggagttatcagtgccaggcactgcatggggatatttcacagaatcaaagagagaggacactttcaggatttcgtgatggtcgttttaatatccttgtggcaactgatgtcgcagctcgtggattggacatacccaacgttgatctagtggtacattatgagatcccaaatacatcggagttatttgttcacagatctgggagaactgcacgagcagggaagaaaggcagtgcaattctaatatacacgtatgaacagactagagctgtaagggtcatcgagcaagatataggatgcaggttcacagagctnccgaagatgccagtttcagacgaggctgcagacatgtttaatgtcatgagagatactcgctctagatcagttggaagcagaagaacaggtgaccttttagccgtgaaggttatggtgactttgaagaccatcgttccagaggcttcggtgattttgagagatttggtggttcctctgaccgcggcggtggattccgtgactcaggttcaaggtaccacggtggatctggaggtttcagacgatcttccagtgactttggcaggcctagcttcagtcgttctgatagatttggcgactttggagacagtgatttcagcagacgtggtaacgctgactttgggcgttcccggagctctgatgattcaggctcctcacgttatccaagaggctatggtggttctggcacgtcagattccggcaacttcggtggcttcaagggttccaagtgatgaatcggatagggttttcttgtacagttctgaaccttttctaacacctgttgtatgttccttccctgaccaaaccagtagcact

SEQ ID NO: 5327 - DNA, 315 bp, Zea mays
atgccacaacttaagcacaaacttgatattgtttcttccaatcctattagttgtgctaaaataaaaactttcaatcctataactagtgtgcaagatgagctgaaattgttatcttctttaaatactttgggctatattgaatttaatgttctatgtaatctaaataaattagaggagaaactttcttttagtgctgatttgccatggttatctaaacatacatatcatgttattggaagatataattggaaagcagaatatatggtacatcgagtatataattgttcaaatatgaaatctccttttgtcataaaa

SEQ ID NO: 5328 - DNA, 570 bp, Zea mays
atggagtcagtgacgacttttatggggcctctgaacgaagcgatcttggaggccaacgcattggtggagcggacgagctcgatctatgccaaccatctaaaagcagcagccggtagcctggccgctttggcatggattggttacaccggcaaaggctgcggtatgcctcttccgattgctcatgtagaagagagctggcaaatggcagagttctacagcaataaggtacttgtggaatacaaaaataaggaccctgatcatgtggagtgggcaaaagccctaaaagagctgtacattcccaatttacgtgactacgtgaagaggtattacccattgggtccttcgtggcaaccgccaggaagcgcagccaacaaggcaccttcagctccgtctgttcctcctccatgtctttccatctcttcagcctcgtcgtcgcaaccaaaatctggaatgtcagctgtctttgctgaaatcagctctgggaaaccagtgacacaaggcctcaagaaggtaactgatggcatgaagaagcaaaaaatagacccggccagaaccgggtgttgtggctgc

SEQ ID NO: 5329 - DNA, 264 bp, Zea mays
atgaggctgtggacgcggccgaccgcgtcgccggaggccgaggaggaggaggacggcgaggcgcacgccgcggcgcaggcgcagggccgcacgtgcgcgcagttggggcagagccggaggaggcggtcccggaggcagtgggggcacaccccgccgccggatctcgcggcagggtgcttccggcacctccattcgtcgcctcctccgccgccgacgacgaccgcggccaccgctgccttcatcgactcacgcggttgctcctcc

SEQ ID NO: 5330 - DNA, 195 bp, Zea mays
atggccgaggccgcaatgctgtggatagtgccttgcgctggttccccatacgagcacatacttcacgtccttgagcaaacttctatggatatgattgcagaagtcctccaccgtgcagccacctctgtcggtggaaagaacaacggggtctgtgaaatcaggctgctggccctgtggctttgtatacaccctcac

SEQ ID NO: 5331 - DNA, 351 bp, Zea mays
atggctgcagcgattgacaaaattaaggaaaaggcaaaactggatgttgtgccagtttttattacagttgatcctgaaagagatactgttgagcaggttcgggactatgttaaagagttccatccagatctagtaggcctcacgggcacgacagatgaagtaagacaagttgcacgtgcttatcgagtttactatatgaagacagaggaggagggttctgactaccttgttgatcactcaattgtcatgtacctgatggacccagagatgaagtttgtcaagttttatggcaagaactacgacacagattcccttgctgacggtatcgttaaagaaattaaagagcacaag

SEQ ID NO: 5332 - DNA, 768 bp, Zea mays
atggcgcccagcagcagcatagcagtactgctgctcctcgtcgtcgccgtcgtcctctccaacgtcccctcctcgggcgccctggcctcctcgtcgtcgtctctgctgcaccagtcgtctccgtctgagagtgagactgagaccgacagtagcagcggagaatctacttcgtcgtcgtcgtcggaagaggccggcgagaaggagaaggagaaggagcaggagatggagaaggcggtcgcggcggagaaggctgcccagcaggagctgctcaagtacgccaaggagaagggcatcgtgtcaccgaccaacggcacggggtggtacaagggcatcgcccgggagttcgtggacgcccacaacgagctccgcgcgcgctacggcgtgccgcccatgaagtgggacaggaagctggcgcggcaggcgcggcgctggtccaaccgcatgcgcaaggactgcgagctcgtccacagcggccacaagtacggcgagagcctgttcaggagccacgacgactggaacgccaccgccaaggaggccgtcttctggtggggcaaggaggagtccatctacgacagggacacggagcagtgcacaggcggcagggcgtacaaggagtgcggccacttcgcgctcatggtcggcaagaggagcaccaaggtgggatgcgcacgagcagagtgcttcaagggaggcgtcttcatcacatgcaactactatgccacggacctcaagaagaagaacaagaagaagaagaagagcaccaccaac

SEQ ID NO: 5333 - DNA, 549 bp, Zea mays
  misc_feature (95)..(95): n = any nucleotide
atgagctccgcgtcgccaacgagtacctcgcccgccgcatcaacgtggtcggcggcaggctcgccgacgagttcagcggtctccgcctcgccganggagcacaccacgccacctcctctgtcaccgctgcccgccgcgccggtgatgccgaagagcatctccgttcgctcgcccggctatctcaagatggtccagaacggcaagcatcgggcgtccaagccaatgaagggctcgcagcgcgtgttagtgggcatggaaggcggagtgaaggaggaggagaagctcaacggcgggctgcagttcgaggtgtacaaccagggcatgctgaagacagagctctgcaacaagtgggaggagaccggcacgtgcccgtacggtaatcagtgccagttcgcgcacggcatcgccgagctccgccctgttatccgccatccgcgctacaagaccgaggtctgccgcatggttctcgctggcgttgtctgcccctatggccaccgctgccacttccgccactccatcacccctgccgatctcttcctcccgcgccct

SEQ ID NO: 5334 - DNA, 444 bp, Zea mays
atgcacgcgaggctgcggtcgtgcggcggtctggtcgtctgccccgagggcaccacctgccgcgagccgtacctgctgcggttcagcccgctgttcgccgagctcgggcacgacgtggcgcccgtggcgctgcactcgtcggtcggcatgttccacggcaccacggcggccgggtggaaggcgctggacccactgttcctgctcatgaaccccacgccggcgtacatcgtgcacttcttggacaccgtcgacgtcgagtgcggcggcccggaggcggcgcgcgccgtggcgaacgagctgcagcggcgcatcgcggaggcgctcgggtacacgtgcacggggctcacgaggaaggacaagtacctcatgctcgccggcaacgaaggaatcgtcgacgtcagccacggcggcggtggcgccaagaagagaactacttgtgctacc

SEQ ID NO: 5335 - DNA, 591 bp, Zea mays
atggccgtggcgctcctcctcctgctggtgacgcccgtcgggctgctcgccgcgctcgcgctcctcacgcggccccgggccgcgcgggtcccgctcaaaggccgccacgtcttcatcacgggcgggtccagcggcatcgggctcgccatggccacggccgcggcgcgggagggcgcgcgggtctccatcctggcccgcaacctcgcccgcctcgaggacgcgcgcgccgccatccagcgcgactcgggcagggacgacgtcggcgtccacgcggccgacgtgcgggacgccggcgccgtcgcgcgcgcgctccaggaggccggccccgtcgacgtcctcgtctgcaaccacggcgtgttcgtgccgcaggagctcgaggggcaggacgtggatgacatcaagtggatggtggacatcaactcaatgggcagcttccactcaatcaaggccgcgcttccggccatgaagccgcgcacccgcgagacgcgcctccctgggctccatcgccatcatgtcctcccagccggccaaggttggtatttatggttacactgcctactcagcgagcaagttcgctcttcgcggattggg

SEQ ID NO: 5336 - DNA, 192 bp, Zea mays
atgctagcaaatgagccgtgcaggtccaagagcgtcaacgaccagtcgtcactgtcgccggcgcacgacagtcatggtgattacaatgatatcgctgaggaggacgaagacgagtgggaggacggcaggaggaagtttggggcggcagatacatttaagattcctgacgagattgacattgctcatttcagt

SEQ ID NO: 5337 - DNA, 651 bp, Zea mays
atgttgtctgctgcatttttattgtcaccaatgggtgtgcacaacacaagcaggagcccaggcctacgacgagtacgggcgcgacgactacagcagcaggacgaagaacgggagcggcggcgcggacaagggcgggccgacgctgtcgaagctggggtccaactcgacggcgcagctgtaccccaaggacgacggcgaggggagggcggcggcggtggcgatgccgccggcgagcgtgatgacgcggctcatcctcatcatggtgtggaggaagctgatccggaaccccaacacctactccagcctcatcggcgtcgtctggtccctggtctcctacaggtggggcatcgagatgccagcgatcatcgcccggtcgatttcgatcctgtcggacgcgggtctcgggatggccatgttcagcctaggcctgttcatggcgctgcagccgaggatcatcgcgtgcgggaacaagctggcggccatcgcgatgggcgtccggttcgtcgcaggccccgccggtcatggccgccgcccccatcgccgtcggtctgcgcggcgtcctcctccacatcgccatcgtccaggctgctctgcctcaggggatcgtgccgttcgtgttcgccaaggagtacggcgttcatcccgacatcc

SEQ ID NO: 5338 - DNA, 240 bp, Zea mays
atgctccagttgctggtgttggaaaggtgtttttggaatatgcagatgtcgagggctcgaccaaagcaaagacggggatgcatgggcggaaatttggcgggaaccaggtggtggccgtgttctatcccgaggacaagttcgctgctgagcagtatgactgaaagttgtagaacctgttctagagttgcaacacacaatgtgtgtgttttttttaaaatctttgagggtaccgttttctct

SEQ ID NO: 5339 - DNA, 846 bp, Zea mays
  misc_feature (345)..(345): n = any nucleotide
atgacctcgatcgccaatccgtacttatgcacacgagcatttcccacgaggccacgaccttcgcccgctcgatcgcgcgcgcgcgctcgaggggacgggcatcatctcccttcggcgtcgcgctgcaggagcctgatcacctcgtcgggcgggacgtcgcgccacacccggggccgcgcggcgccgtggccgagcttggcgaagccgtgcgccacccggttacccccgcgccgcacgtgcgagacgctcatgtcgtcgagcagcagcagcagcttctcgatctccccgaacaggcgcaggtcctccggggcccgtacccgcacgcgcgcgcggctccgcacgggntcgaccaccgccatggcgtcgccctcgacccagacgctgcgccagccgttggccaccgcgagctccagcccgcgccgggagcgccgcgagctccgccacggagctggtcgcggcgccgatccgctccgcgtagcccagcacgaacccgccctcgtggtcgcggtacacgccgccgatgctcgcgcgccgggacgcgtgcctcgacgacccgtcgaagttgagcttcagtcgcccgggctccggcttcctccacgtgctcgccgacggctccggtcgcgacggcccgttgttatcacccccgcgcagcccccggcgcccgcccggcgccgcccttccgccgccgacgaggcaggccgacaaagggtggcacagcagcatgctgccagtgacaagaggacggtgcacccgcagcatcgttccccggcgtcaaactgctgcgcggcgaactttgatgcgcatttagcgcccgtgcacgcactttgcttgaagcgatcgctcgcc

SEQ ID NO: 5340 - DNA, 189 bp, Zea mays
atgtccgtcaacttcgttgacctcgacgccgccgcgcccggggacgccctccgcatcaccgccagggcgctcggccacaagggcgcctactccggcacgcacgtcatcgtcgccaacgccgccacggggctggtggtcgccgaggggaggcactcgctcttcggcaagatgaagatcaggagcaacatc

SEQ ID NO: 5341 - DNA, 252 bp, Zea mays
atgttccgggaggagtacgaacgtcgtagcagacagctccgcgagctctgccgcgctgtccgcgtcgacaccgtagccgagctccaggagttgctctgcgccatggtactcgccgagtgcgtctacaagagacctgtttctgagatgatgagatatatcaacaagtttacgtctgattttggtggaaatgttgtgtccctggagcgtgttcaaccatccttggatcatgtaccacatcggttaccaaaaagc

SEQ ID NO: 5342 - DNA, 918 bp, Zea mays
atggacggcggaggaggaggcggtggaggaggaggtggagttggggcaggtgtcatggtgggtggcggagtcgtgccgggcggcgggggcggcgacgtggaactcgtcagcaagacgctgcagttcgagcacaagctgttctactttgatctgaaggagaacccgcgggggaggtacctcaagatctccgagaagacatcggccacgcgctccaccatcatcgtccccatcgacggcgtcgcctggttcctcgacctcttcgactactacatccgcaccgacgagcgcgacgtcttcagcaaggagctgcgactccagaccaaggtgttctatttcgatatcggggagaacaagaggggccgattcctcaaggtttctgaggcctctgtcaacagaaaccggagtaccataattgttccagctggcagctctggtgaagagggctgggaagcattcagaaatgtactgttggaaataaataacgaggcttccagattgtatgtcctaccaaatcatccaaatcagcaacacatggagccgccagagcgtcttcctggcttgtcagatgatgtgggtgccggatttatagctggacatggtagccagtccgcttctgggccagaggtagatgtcgaacgtttggttgatctgcctcctcaagaagaaattagtggcatgggtatgtctaaggtgattagggcagatcagaagaggttcttcttcgacctgggaagcaacaacaggggccattatttgaggatttctgaggtggctggagttgatcgttcgtctataatcttgccgctctcgggtttgaagcagttccatgaaatggttggtcactttgtagatataatgaaggacaggcttgaaggaatgacaggagctaacgtgcgcactgtcgaatccagtcagaga

SEQ ID NO: 5343 - DNA, 450 bp, Zea mays
atgcctacgacgatggcggcggcggcggcagcgtctgctccaagctcgctccgcgtttcgcgccaggggacgatcgggggaggccatgtcctctacagcaggtctcagagggctgccactgtctccgccagagcttccatgaacataacgtgctgcgcgaaccagacgcagacggcgcagcgcaagtcgtattcggggacgacctctccgccgtcaggttcagtgaaagagaaggtgaagccgaggctcgacgacgggggcgtcgggtttccgccgttccggttcgggggaggcggaggaggaggcggcggcggcggcagcagctcgtccggcgggttcatcctcttcgtggtcgtcctgctcctggattacctcaaggagttcgagaggaacctgcagaacgggccacggaggagcggcggtggctacgacgacgggctggcgccacag

SEQ ID NO: 5344 - DNA, 162 bp, Zea mays
atgaaccgagggcccggcgccgatacctccgccagggtgccgtggccgggataccacgtgctcaacgactccgccgacgccgccaacttcaccgcgctcgacttcatccagggagacatctggctcaacgccacctcattcccctacacgctgggatttacg

SEQ ID NO: 5345 - DNA, 426 bp, Zea mays
atgggtcgcgtccgcaccaagaccgtgaagaagacctccaggcaggtgatcgagaagtactactcccgcatgaccctcgacttccacaccaacaagaaggtgctggaagaggtctcgatcctcccctcgaagcgcctccgcaacaaggttgccggcttcaccacccacctgatgcgccgcatccagcggggccccgtccgtggcatctcgctcaagctgcaggaggaggagcgggagcgccgcatggacttcgtcccggagaagtcagcgctcgaggtcgaagagatccgcgtcgacaaggagaccatggagatgctcgcggcacttggcatggccgatctcccgggcgtagagcgccaggctgaggttttcagggtccccgcctacggccgcccccagtatggaggtcccccccgtgaccgggtt

SEQ ID NO: 5346 - DNA, 963 bp, Zea mays
atggcgcgcctgctcctcttcccatcccaagcgtgcgtcgatcctggccgccacctcctcctccacccgccggtctccaggccccgtgctgtccggtctgggcctcctcccgccgcgccacgccgcaccggggtcgtctctcttcccggccgttgcccaccgcccctttgctggaaccaccatccatttcttccttgcagatcatcaaagagaggatgggtcgtttttgcttcagaaaacgtacaagaaatttcttctcaccttcctcgcaaggatgaaaggagaagtgggaatttgcttctgcgattcagtgcactcccatattgcactatggcttggttgagcactgctcaattagcacaatctagtgttggggaaaagctaaatatggtttatgaggtcggggagctgtttgagctgggaattcagctgtcttatctgctcatacttattggactgcttggagctggtacattttttgttatccgtcaggttcttgttcgtagggagcttgatctttctgccaaagagttgcaagaacaagtgagaagcggtgatgcaagtgctactgagtattttgagcttggagcagtcatgctacggagaaaattttatccagctgctatcaaatatctgcagcaagcaattgacaaatgggacagagacgagcaagatcttgcgcaggtctacaatgccctgggggtcagctacaagcgagagaacaaacttgacaaggcgattcagcagtttcagaaggccgtggagctccagccaggctatgtgacagcttggaacaacctgggtgacgcatatgagcagcagaaggacctgaaatcggctctcaaggccttcgaggaggtcctcctctttgatcccaacaacaaggttgcaaggccacgcgtcgatgacctcaggccgcgcgtgagcatgtacaagggtgtgcctgtaaaatccgaaaagcga

SEQ ID NO: 5347 - DNA, 351 bp, Zea mays
atgcctggatcagttggcctcagagactgcaaagcgctcgagaagatggtcaagacccacgccgaggatgggggcctctacggcgccatctgtgctgcgccggcggtgacgctggcttactggggcatgctcaaaggcttaaaggcgacatgttatccgtcgttcatggagaagttcactgcagaggtgatccctgtggacctcgagggtcgtggtcgacagaaatgcgatcaccagccagggtccaggaaccgcagtcgagtttgctcttgctttggtggagaagctgtatggcaaagagaagatggaggaggttgctggacctttgtacttgcgtcctcaacatggagt

SEQ ID NO: 5348 - DNA, 399 bp, Zea mays
atgctctcatccgccttttcatccactgcctccaccgagagggtttcgcagtcgccggcggagcccgaggcggtgctcatgacggaaggttgcgtccggagattaaaagaattacatgctaaagaaccatcctctgaaggtaagatgctgcgcttaagcgttgaagctggtggatgttctgggtttcaatattctttcgctcttgatgacaagaaaaactcagatgatagggtttttgagactgatggtgttaaattggtcgtggatgacatctcatatgactttgtaaaaggtgccactgtggattatgaggaggaacttatacgttcagcgttcgtggtttcaacaaatcctagtgctgttgggggctgcagctgcaagagttctttcatggtgaaa

SEQ ID NO: 5349 - DNA, 471 bp, Zea mays
atgtcgacggccgggagcggcagccttcgcccggccgtggtggaggacacgggcagacactgggcgccgcacggacctgtgctgacggcctgcgtcgtggccatcaacgtgctcatgatcctcctcgtcttcgtcttcttctggcgctacttctccggtaaacggggaccatccgcgtcatccggcggcggcgacggcgacgacgacgacgcgtcgtcatccgcgtcgctgcccgtggcctccccatgggcatggtcgtcccgccggcggagcagcaaggaccacggcccgcagccggtggacgacgacgtggcgtcggcgctgcccgtgtacgtgtactccagcagcgccggcggcgaaggcgggaaggccccggagtgcgcggtgtgcatcctggagctccgcgacggcgactcggcgcgcctcctcccgcgctgcgggcaccggttccacgccgactgcgtgggcgcg

SEQ ID NO: 5350 - DNA, 102 bp, Zea mays
atgccagatttgaacaaaaacatcatttatctggcaacccacttatttcgagctccttccatagcctcttctcgcacccttgtcaattcatctcaaccaaac

SEQ ID NO: 5351 - DNA, 525 bp, Zea mays
atggaggcgctgtttgggtgcaacaaacatggcggggacaaggccgctgatttggcctcgtttataatcgtgcaggctgccttggaggtgccaaggttacttgggctccttgccatgattcttcataatgaaatctttacatctggtggagatcagaatttgattaataggattctgagcaaaaacaaaaatgcaactgatttcgagaacaaggatgatggagagtctgatgatgataatgatgaggagggagacgatgaggatgctgaaaaccaagaagatgatggtggtgatgagggatcagatgacaatgggaatgaggaggaagatgacgacgacgatgataacgatcctgcagccaacggtgaaggaggaagtgacgacgatgatgatggtggagaggatgaagaggaggatgatgacgacgatgatgatggggatggtgacaatgaggaagatgaggaggaagaagaggaagaggatgatgacgatgatgtcccccaaccacctactaagaagaggaaa

SEQ ID NO: 5352 - DNA, 600 bp, Zea mays
atgctcctctccggcccggccgtcagccgcgacgcgggcgcgctcttcgccggccaccacgtcgcggcgccgctcttcgcccagtaccacccctacgcgtcggccgccacgctctccgcctccgcgccgttcccgacgatcaccctcgacctcacgcactcgccgccgccgccggccgcgggcctgctccagcaccgtctgcccacgccgcccgtcccggccatgccgttcccgatgccgtacggcttccctggtgctggtgggcacaggctggcggcggcgccggtgccagccccacacccaccggccggcgcgacgctgctgggtttggacggaaggaaccggtcggcactggacaccatgacggccgcgatcgccagcgaccccaactttaccacggcgctggcggccacgctctcgacgatcatggccggagccggaggcgctgagccacaagctcctcacctaagcggcgccgctgacgcctccggagatggtggtaacggtagcgccggcactgggcccgccacggctgcggctgccggagcacgtgagactgcattgcatgcgcttttgcaaaggcttaatgacagcaggcaa

SEQ ID NO: 5353 - DNA, 831 bp, Zea mays
atggcggcggacggcggcggcggggtggactgggagagcctggcggaggccacctccggggcaatcggctcgctcgtcagcaccaccgtgctctacccgctcgacacctgcaagaccaagttccaggccgagctccagacgcaccagggcgctcagaagtataggaacctttcagatgtcttttgggaagcgattcgtaaaaagcaatttttgtccctatatcagggcctgaacacgaagaacattcagtcttttgtctcctcgtttttttatttttatgggtatagctattttaaaagactctacttggagaagagtggagcaaagtctattggaacaacagccaacttgttagttgctgctgctgctggtgcttgtactgttatcgtgacacagccattagatacagcagcttctaggatgcagacaagtgtctttggaaagtctaaagggctgagagaaactcttgcagaaggtacttggatggaagcattcgatggcttaggcatttccattatattgacttgcaatccttctattcagtacaccgcgtttgatcagttcaagcaaaggatacttcataggcagcggcgcaaaaatgcaggatcagcggaggataattccggagttgctctttatgctttctcagcttttctgcttggcgccgcctctaaaagtattgctacagcattgacttatccattaatcagatgcacggtgatgattcacgtcgccgaccctgacgaggatgatgacaaccaacctgtaacgtcacctcaattatcaccccccaatacagtgctctgggccctcgttagcgccctgcgattt

SEQ ID NO: 5354 - DNA, 366 bp, Zea mays
atgaccagagcattgtggatattgatccaaaagcagagctgctcctcgtgcgtcatcttcaccgggtcgactttctccaggcgctgtatcagagacctggtagtctcgagcatcttcgacgcgtactcaaacgtgtcagcgtcgacgcgtatcctcggaacgacgaccatcatcacgcctgggctctgctcaccgctctccttctcgactccacacggccgcgggctccagctatcgaagttgttgcaccgagaccgagggctccagctatcgttccggcgcctcggagagaaggtgctccaagacgagaccgaagggctcggcgaagccacgcagcactccccctccgcgcccgagagcttgcag

SEQ ID NO: 5355 - DNA, 426 bp, Zea mays
atgaaggaggcgtctctttccgccagggaggtgcagatagatgagatgagggcggacgtgttcaggaacctgctgcacttcatctacaccgacgcgctgcccaagtccgagccccaggaagaagaggcccttatggctcagcacctgctcgtcgccgccgacaggtatggcatggagaggctcaaactcgtctgcgaggacatcttgtgcaggcacatcgacgtcagtaccgcggccaccacgctggcccttgctgagcagcaccaatgccaggggctcaaggaagcatgctttcagttcctcaagaagtctcctgggtcgctgaatgatgtcatggcaactgatggatttgaccatctggccaacagctgcccgtccattataaaggagttgatgtctagacttgctgctgcccattattccaac

SEQ ID NO: 5356 - DNA, 291 bp, Zea mays
atgggtcgtcctacttctaccagcctggtgaaattgccggtcgtagaagttcaactgaactggctcatgtatggaacaaggcggtggacgagactcttgggaaacttgttgtgtaccttagctctcgtggatggtgatccaagcaccatgtcgaacatggcaactgaggaggcacgggtggaggaagactcttttttgaagccactgatgtgctcatatttctctgtatccggattgagcatgttttgttttaaaagaaaagatgctcccagtgaccgatttatctcgaac

SEQ ID NO: 5357 - DNA, 420 bp, Zea mays
atgcggaatgcccttttgtcaactgcaacaagtggtgatcaggatgaaagtagtcaggcaaaagataaaatctcggtaacatttgtcaacaaggatggctcagaaaagacaatatgtgttccagttggaatgtccatgttagaagctgctcatgaaaacgacatagagcttgaaggagcatgtgagggctcacttgcgtgttctacttgtcatgtaatagtaatggatgtaaaatattataacaagttagaagatccagcagatgaagaaaacgatatgcttgaccttgcatttgggctcacagaaacatcacgccttggctgccaagtgatcgcgaagcctgagcttgatggcatgcggctggcgctacctgtagccacaagaaacttcgcagtagatggctatgtaccgaaaccacac

SEQ ID NO: 5358 - DNA, 669 bp, Zea mays
atgaaggctttgggcatctcgaggccgtttcccttgtcgcaggttgactcccccgccggtgtcggccacctttgtcccctccccaatggtttgagacctcggggttcttggagtagaaaggtccagtgtcccatttcatccatgtccaaatgcttttcccaccatgcaagattctcacgttacattgtctatttcaaccttggatctcaaacgatatcttttaaagcaggcgacgaggtcgtccacctcggcggcgtcaacgtctgcgagtacctcctgcgggtgcgggtgcccctcgggggcctcaccggtctccggcgcggatcctgtgcggtcgagcatctgggaccgcggcgggggccggtagaggaagaggtcgtagaggaacctgccctgcggcgtgagcagcgcggcgtaggcgggcgccgcggggccccgcgcgggcgcgttcggcgtgggcgcgtaccgctgcggcgacgacgcgccggccgcggagaaggcggagaggaggtcgttggtgagcagcgagtggaggaagcgcgccgcctcgggccccgcgaagcggaccacggcgcgggacgccaggcggcaggccagcacccccgggccgcggcgcggggccggggtcgtgtggagggcgcgcgcgccgcgcggcagcggctggaggag

SEQ ID NO: 5359 - DNA, 444 bp, Zea mays
atgttgccctggttcgagttggcgttatcgacgcggagcagcgagacagcgttgccgtggtcgcggccgttggcaatgtgggccatctcctgcacgtcgccgccgttggagagcatgtcccactcgctgcgggtggcgtcgtcccggaggaagccgaagacgcgcgcgggggccacggggagccagaaggaggtggcggcgttgaggatgatgcccggcggccggcccgggtcgtccacgctcttgcgcgtcatcacgcgcacgtcctccgcgccgctgcccgacagcgtggtccactggtgcgtcgtcgacgccgtcacgccgccgcagaagctcgccaccatgcgctccgccagccgcatcatgctgcggcgcccctctggcgacgtcaccacgcccgcgactgtccctgctgcttccgcccaatctaacgacacgctggcc

SEQ ID NO: 5360 - DNA, 231 bp, Zea mays
atgcacatggacttaaacccctcagaaagtgctctgagacaaccaccattgcaccaccgcatagcgccatcaccaccaccaccaccaccaccgccgaaaatcaccatcagtaaagttttagcaagattccccttactctcaagtagctacattacagcactcataagaggaagaataagacgcgtacccacaagaaatgcctccgaggactacgacagcaacgtaaaagcc

SEQ ID NO: 5361 - DNA, 318 bp, Zea mays
atggccggcgggcttgaggatccgcgcggcctcggcggcgaggtcggccgggcgcttggcggcgtcgagggcgcgccccgcgaagacgaagtcggcggacgacgagccgaacggcagtctccggtcgccccccgcgacgacgagcggcggcgcacgcctcctgccgacggcgacggctttggcgacgccgagctcccgcatcgcgagcgccccctgcgggccgcccaggcagacttttcttttctgcgggcgagagggcgccgaacgatgatgcgcggcgcgagggcggccgcgtggacaacgaccgcccagccattg

SEQ ID NO: 5362 - DNA, 501 bp, Zea mays
  misc_feature (500)..(500): n = any nucleotide
atggttgaattaagagcttttcaagaaacatctgatgcatcacagcgatctgctgcaaccttgccattgtccccatcatctggcgattcttttcctggaggaaaagatgaggtttcggttattaaagcagggttgaggaaggtaaaaattctcacagatctggtgtcgacacgaaggcctaagaagacttgccaggcaggtggcgaagataagttttgtgttaacagtgatggtgctgaatatccatgtgatactgagtctcttgatgacgatctagatgacagagtagaggaagatgaatttggagattcaactatcaggaagtctttcagttatgggtctctgcaatctgtcaactatgttggtggcctagtttatgcccatgcaaagattgatggggagcatgaggactggatatattatagtcacccgaaaactgatgtcggtttccaagtagagaaagtattggcatcaaccacagagaatgggttgctaactgnc

SEQ ID NO: 5363 - DNA, 558 bp, Zea mays
atgaggatgtgcggctgcgtcgccggcgctgcagcagaagctgccgctgctgttctcgtcctcctcctcctcctcctccggcgccgggcacgcggcggcgggctcggcggagaggcggacgcccgtgagcaggaaccgggcgtggcgcatggtcaggtcgctggcggtgtgcaccgacacgtcgcagtcgcggcacaggatggcgcggtcctccttgcagaacaggagcccccgcttgtcctggcagatgtcgcaaagcggcggcggcggcggtggctccgggctgagcagcgagaagcggcggtgcttgccggcgagcttgttgggcgcgggcacgccggcggtcgctcgccgtcgtacagcgcccctcttcgtgggcgcattttgatccccgaaggccgccttcggccgccgctcaccgtcgcaactgcacccttcattcttcggcccactccactcctgcctttccccctcacggcggatgtctcgcgccgcgcttcctgtccgggtcctgtcttacgggccttcggccctccccaggccctctcgctcctactt

SEQ ID NO: 5364 - DNA, 1464 bp, Zea mays
  misc_feature (25)..(25): n = any nucleotide
  misc_feature (43)..(44): n = any nucleotide
  misc_feature (267)..(267): n = any nucleotide
  misc_feature (270)..(270): n = any nucleotide
  misc_feature (330)..(330): n = any nucleotide
  misc_feature (380)..(380): n = any nucleotide
  misc_feature (405)..(405): n = any nucleotide
  misc_feature (411)..(411): n = any nucleotide
  misc_feature (433)..(433): n = any nucleotide
  misc_feature (436)..(436): n = any nucleotide
  misc_feature (440)..(440): n = any nucleotide
  misc_feature (442)..(442): n = any nucleotide
  misc_feature (451)..(451): n = any nucleotide
  misc_feature (453)..(453): n = any nucleotide
  misc_feature (455)..(455): n = any nucleotide
  misc_feature (462)..(462): n = any nucleotide
  misc_feature (471)..(471): n = any nucleotide
  misc_feature (477)..(477): n = any nucleotide
  misc_feature (479)..(479): n = any nucleotide
  misc_feature (481)..(481): n = any nucleotide
  misc_feature (483)..(483): n = any nucleotide
  misc_feature (522)..(522): n = any nucleotide
  misc_feature (524)..(524): n = any nucleotide
  misc_feature (528)..(528): n = any nucleotide
  misc_feature (532)..(532): n = any nucleotide
  misc_feature (534)..(534): n = any nucleotide
  misc_feature (536)..(536): n = any nucleotide
  misc_feature (538)..(538): n = any nucleotide
  misc_feature (551)..(551): n = any nucleotide
  misc_feature (553)..(553): n = any nucleotide
  misc_feature (555)..(555): n = any nucleotide
  misc_feature (557)..(557): n = any nucleotide
  misc_feature (559)..(559): n = any nucleotide
  misc_feature (561)..(561): n = any nucleotide
  misc_feature (564)..(564): n = any nucleotide
  misc_feature (583)..(583): n = any nucleotide
  misc_feature (585)..(585): n = any nucleotide
  misc_feature (587)..(587): n = any nucleotide
  misc_feature (589)..(589): n = any nucleotide
  misc_feature (591)..(591): n = any nucleotide
  misc_feature (593)..(593): n = any nucleotide
  misc_feature (595)..(595): n = any nucleotide
  misc_feature (597)..(597): n = any nucleotide
  misc_feature (599)..(599): n = any nucleotide
  misc_feature (601)..(601): n = any nucleotide
  misc_feature (603)..(603): n = any nucleotide
  misc_feature (610)..(610): n = any nucleotide
  misc_feature (612)..(612): n = any nucleotide
  misc_feature (614)..(614): n = any nucleotide
  misc_feature (616)..(616): n = any nucleotide
  misc_feature (618)..(618): n = any nucleotide
  misc_feature (621)..(621): n = any nucleotide
  misc_feature (623)..(623): n = any nucleotide
  misc_feature (625)..(625): n = any nucleotide
  misc_feature (627)..(627): n = any nucleotide
  misc_feature (629)..(629): n = any nucleotide
  misc_feature (679)..(679): n = any nucleotide
  misc_feature (691)..(691): n = any nucleotide
  misc_feature (693)..(693): n = any nucleotide
  misc_feature (695)..(695): n = any nucleotide
  misc_feature (697)..(697): n = any nucleotide
  misc_feature (701)..(701): n = any nucleotide
  misc_feature (703)..(703): n = any nucleotide
  misc_feature (705)..(705): n = any nucleotide
  misc_feature (707)..(707): n = any nucleotide
  misc_feature (709)..(709): n = any nucleotide
  misc_feature (711)..(711): n = any nucleotide
  misc_feature (723)..(723): n = any nucleotide
  misc_feature (731)..(731): n = any nucleotide
  misc_feature (733)..(733): n = any nucleotide
  misc_feature (735)..(735): n = any nucleotide
  misc_feature (745)..(745): n = any nucleotide
  misc_feature (747)..(747): n = any nucleotide
  misc_feature (749)..(749): n = any nucleotide
  misc_feature (751)..(751): n = any nucleotide
  misc_feature (753)..(753): n = any nucleotide
  misc_feature (755)..(755): n = any nucleotide
  misc_feature (757)..(757): n = any nucleotide
  misc_feature (759)..(759): n = any nucleotide
  misc_feature (761)..(761): n = any nucleotide
  misc_feature (765)..(765): n = any nucleotide
  misc_feature (779)..(779): n = any nucleotide
  misc_feature (795)..(795): n = any nucleotide
  misc_feature (797)..(797): n = any nucleotide
  misc_feature (799)..(799): n = any nucleotide
  misc_feature (801)..(801): n = any nucleotide
  misc_feature (803)..(803): n = any nucleotide
  misc_feature (805)..(805): n = any nucleotide
  misc_feature (807)..(807): n = any nucleotide
  misc_feature (809)..(809): n = any nucleotide
  misc_feature (811)..(811): n = any nucleotide
  misc_feature (813)..(813): n = any nucleotide
  misc_feature (817)..(817): n = any nucleotide
  misc_feature (821)..(821): n = any nucleotide
  misc_feature (841)..(841): n = any nucleotide
  misc_feature (845)..(845): n = any nucleotide
  misc_feature (854)..(854): n = any nucleotide
  misc_feature (858)..(858): n = any nucleotide
  misc_feature (860)..(860): n = any nucleotide
  misc_feature (862)..(862): n = any nucleotide
  misc_feature (864)..(864): n = any nucleotide
  misc_feature (866)..(866): n = any nucleotide
  misc_feature (868)..(868): n = any nucleotide
  misc_feature (874)..(874): n = any nucleotide
  misc_feature (876)..(876): n = any nucleotide
  misc_feature (878)..(878): n = any nucleotide
  misc_feature (880)..(880): n = any nucleotide
  misc_feature (882)..(882): n = any nucleotide
  misc_feature (884)..(884): n = any nucleotide
  misc_feature (886)..(886): n = any nucleotide
  misc_feature (888)..(888): n = any nucleotide
  misc_feature (890)..(890): n = any nucleotide
  misc_feature (892)..(892): n = any nucleotide
  misc_feature (894)..(894): n = any nucleotide
  misc_feature (896)..(896): n = any nucleotide
  misc_feature (898)..(898): n = any nucleotide
  misc_feature (900)..(900): n = any nucleotide
  misc_feature (904)..(904): n = any nucleotide
  misc_feature (906)..(906): n = any nucleotide
  misc_feature (908)..(908): n = any nucleotide
  misc_feature (910)..(910): n = any nucleotide
  misc_feature (912)..(912): n = any nucleotide
  misc_feature (914)..(914): n = any nucleotide
  misc_feature (916)..(916): n = any nucleotide
  misc_feature (918)..(918): n = any nucleotide
  misc_feature (920)..(920): n = any nucleotide
  misc_feature (922)..(922): n = any nucleotide
  misc_feature (924)..(924): n = any nucleotide
  misc_feature (926)..(926): n = any nucleotide
  misc_feature (928)..(928): n = any nucleotide
  misc_feature (930)..(930): n = any nucleotide
  misc_feature (932)..(932): n = any nucleotide
  misc_feature (934)..(934): n = any nucleotide
  misc_feature (938)..(938): n = any nucleotide
  misc_feature (940)..(940): n = any nucleotide
  misc_feature (942)..(942): n = any nucleotide
  misc_feature (946)..(946): n = any nucleotide
  misc_feature (948)..(948): n = any nucleotide
  misc_feature (950)..(950): n = any nucleotide
  misc_feature (952)..(952): n = any nucleotide
  misc_feature (954)..(954): n = any nucleotide
  misc_feature (956)..(956): n = any nucleotide
  misc_feature (958)..(958): n = any nucleotide
  misc_feature (960)..(960): n = any nucleotide
  misc_feature (962)..(962): n = any nucleotide
  misc_feature (964)..(964): n = any nucleotide
  misc_feature (966)..(966): n = any nucleotide
  misc_feature (970)..(970): n = any nucleotide
  misc_feature (984)..(984): n = any nucleotide
  misc_feature (986)..(986): n = any nucleotide
  misc_feature (988)..(988): n = any nucleotide
  misc_feature (990)..(990): n = any nucleotide
  misc_feature (992)..(992): n = any nucleotide
  misc_feature (994)..(994): n = any nucleotide
  misc_feature (1002)..(1002): n = any nucleotide
  misc_feature (1004)..(1004): n = any nucleotide
  misc_feature (1006)..(1006): n = any nucleotide
  misc_feature (1008)..(1008): n = any nucleotide
  misc_feature (1010)..(1010): n = any nucleotide
  misc_feature (1012)..(1012): n = any nucleotide
  misc_feature (1016)..(1016): n = any nucleotide
  misc_feature (1018)..(1018): n = any nucleotide
  misc_feature (1020)..(1020): n = any nucleotide
  misc_feature (1022)..(1022): n = any nucleotide
  misc_feature (1029)..(1029): n = any nucleotide
  misc_feature (1031)..(1031): n = any nucleotide
  misc_feature (1033)..(1033): n = any nucleotide
  misc_feature (1035)..(1035): n = any nucleotide
  misc_feature (1037)..(1037): n = any nucleotide
  misc_feature (1039)..(1039): n = any nucleotide
  misc_feature (1043)..(1043): n = any nucleotide
  misc_feature (1045)..(1045): n = any nucleotide
  misc_feature (1068)..(1068): n = any nucleotide
  misc_feature (1070)..(1070): n = any nucleotide
  misc_feature (1072)..(1072): n = any nucleotide
  misc_feature (1074)..(1074): n = any nucleotide
  misc_feature (1076)..(1076): n = any nucleotide
  misc_feature (1078)..(1078): n = any nucleotide
  misc_feature (1080)..(1080): n = any nucleotide
  misc_feature (1082)..(1082): n = any nucleotide
  misc_feature (1084)..(1084): n = any nucleotide
  misc_feature (1086)..(1086): n = any nucleotide
  misc_feature (1088)..(1088): n = any nucleotide
  misc_feature (1090)..(1090): n = any nucleotide
  misc_feature (1092)..(1092): n = any nucleotide
  misc_feature (1094)..(1094): n = any nucleotide
  misc_feature (1096)..(1096): n = any nucleotide
  misc_feature (1387)..(1387): n = any nucleotide
  misc_feature (1389)..(1389): n = any nucleotide
  misc_feature (1395)..(1395): n = any nucleotide
  misc_feature (1401)..(1401): n = any nucleotide
  misc_feature (1405)..(1406): n = any nucleotide
  misc_feature (1409)..(1409): n = any nucleotide
  misc_feature (1412)..(1413): n = any nucleotide
  misc_feature (1415)..(1415): n = any nucleotide
  misc_feature (1418)..(1418): n = any nucleotide
  misc_feature (1423)..(1423): n = any nucleotide
  misc_feature (1431)..(1431): n = any nucleotide
  misc_feature (1434)..(1435): n = any nucleotide
  misc_feature (1439)..(1439): n = any nucleotide
  misc_feature (1441)..(1441): n = any nucleotide
  misc_feature (1444)..(1444): n = any nucleotide
  misc_feature (1449)..(1449): n = any nucleotide
  misc_feature (1457)..(1457): n = any nucleotide
  misc_feature (1461)..(1461): n = any nucleotide
  misc_feature (1463)..(1464): n = any nucleotide
atggcttgcgtgtgcggtgctgctnctctctctctcccccccnncaggggggcgcgccgcgcagcgaacacacacacccccacagagatggttgttttgtgtggtgtggggcggccccccccccccccaccaggcgaggggcgcgcacactatatggggtggtggcgcggcaggggggccgcgcccccccccccccccgccgcgcggggtggtgagaggaggagaacaccccctcttttttcttcctctcccgcgcccgtcgttgtnggngtccctcccccgggaggtgcgccccgcggggcgcgcccacaaagagaggaccgcctttgntgtggtttttctccccctcgcgggagtcggcctctctccctcctccccanccgctctttgttgtgtgtggagagngtgtgngcgcgcgcggcgcggagtcctntcnagananagttgtgtntntnggggtgngggcgcgcncgcgcncncncnccccccccccgcccgcgcgcgcgcgcgcgcgagagaggngngagncacncncncnccgcgagagaggngngngngngnggngggggggtgtgtttttttntntnananancncncncncncccactntntntngntcncncncncnccctccccgcgcgcgcgcgcgagcgcgcgctctctctctctttctatgtntcccgcgcgagnancncnctcncncncncncnctctctctgcgngtgtgtcncncnctctgtgtgngngngngngngngngngagngagagagagacacncccccccccccccccncngncntncntntntntngcgntcgngagagaggggggtgtcattnatanagagagagngagngngngngngngggggncncncncntntntntntntngngngncgcncncncncncncncncncncncngngngngngggngngngggngntntntntntntntntntntgtntgtgtgtgtgcgcncncncncncncccccgcngngngngngntgtngngngntctctcncncncntntntttntntatatatatcttctctctgcgcncngngngngngntntntntntntntntngagagagagagagagagagagagagagagagagagagagagagagagagagagagagagagagagagagagagagagagagagagagagagagagagagagagagagagagagagagagagagagagagagagagagagagagagagagagagagagagagagagagagagagagagagagagagagagagagagagagagagagagagagagagagagagagagagagagagagagagagagagagagagagagagggagagagagagagagagagagagagagagagangnccgggncccggngctnnctnagnnanggntagtnccccgctncgnnacgngnggnggccnccccaganggcntnn

SEQ ID NO: 5365 - DNA, 702 bp, Zea mays
  misc_feature (468)..(468): n = any nucleotide
  misc_feature (627)..(627): n = any nucleotide
atggcgtcgagcagcactgaccttgccgacgacggcttcgcggcgccgcgacttttctcgcagggtgtatcctacacatacgacgacgttatcttcctcccgggctacatcggcttccccgccgacgccgtcgacctctccacccgcctctcccgccgcatcccgctatccatcccctgcgtcgcgtccccgatggacactgtctccgaggccgctatggccgcggccatggcatcactcggcgccgccgctgtcgtgcactgcaacaccgatccccacgctcaggccgccatcgtccgcgctgccaagtcccgccgccttcccttcgtttcctccgtgccctttttctccccgtcctccgccccgacgctcaacgatttcgctggcaccgagtacgccctcgtcaccgagcgcggagattcgctctccaggctcgtcggcgtcgctgtcgcggccgatgctgcctcncgcgaggttcccgtctctgtctcggagtacatgcgaccgacgccgcgctcagcctccgccgccttcgactttgaggaagcagcaaccttccttgccgatgagggtctggattacgcccctctcgtatcagatgatggtgaggttgttgatctaatcaancgcaaggacgtggagcgcatccggagctatcccaagctggggcaagccgtctcctgggagccacggggaagtttg

SEQ ID NO: 5366 - DNA, 609 bp, Zea mays
atgaacatcggcaacccacccaagccatacttcctggacgtggactccggcagcgacctcacctggctgcagtgcgacgcgccctgcaggagctgcaacgaggtgcccgcacccgctgtaccggccaacaaagagcaagctggtgccatgcgtgcaccggctgtgcgcttccctgcacaacgggctgaccgggaagcacagatgcgactcgccgcacgagcaatgcgactacgtgatcaagtacgcagaccaggggtcgttcaccggtgtgctcatcaacgacagcttcgcgctccgcctcccaacggttctgtcgcccgtcccagcggccgccttcgggtggggctacttcaccgtacggtctcatcgctgcaccgtcgtttcggcttccgtcggtgtgttttggtccttgtttcgcggcgttctgccggccggttgcttctacaacgggccccccgcccccacaaccttcgcccgtcatttcacttactacggatacggggctcctcctcgtccctcgtgagccgacctgtgccatccgtggctctgttcctcgccccccacttactgccaaatccgctcctgctggatgatatcttatatggctgt

SEQ ID NO: 5367 - DNA, 462 bp, Zea mays
  misc_feature (414)..(458): n = any nucleotide
atgcccaacgggtcgctaggcgagatgctgcacggcggcaaggggggccacctcgggtgggaggcccgggcgcgcgttgcggcggaggcggcgcgcgggctctgctacctgcaccacgactgcgcgccccggatcatccaccgcgacgtcaagtccaacaacatcctcctcgactccgccttcgaggcgcacgtcgcggactttggcctcgccaagttcctcggcggcggcggcgccacgtccgagtgcatgtctgccatcgccggctcctacggctacatcgccccagagtacgcgtacacccttcgcgtggacgagaagagtgacgtgtacagcttcggcgtggtgctgctggagctcatcacggggcggcgccccgtgggcagcttcggcgacggcgtgcggacgcgtggnnnnnnnnnnnnnnnnnnnnnnnnnnnnnnnnnnnnnnnnnnnnngtct

SEQ ID NO: 5368 - DNA, 360 bp, Zea mays
atgactgttaggctagtagtaagctacaatggtctcagcattggcacagttcgagatgcatttgagaagtctcttggcttccggttgcaaaagatgaatcctaatactgattatggttgcttgaagacttttggttcttgttttagtgaagacattcgtatacctgctggtacaaagattgacttccggcaaacatctgatggccagctaataactgaaattgatggcaaacaaattggcactgtccagagcaaagatctttgcagagccttcttcgatatgtatattggtgaccccccagtttcagtggagactaaacaagacattgcgcaaaatgtggctggactcataagaagatgc

SEQ ID NO: 5369 - DNA, 666 bp, Zea mays
atgggcacgccggagacgtcgcgggagccgtgcccggaccggatcctggacgacgtcggcggcgcgttcgggatgggcgccgttggcggctccgcttatcacttcatcaagggcatctacaactcccccaacgggatgcgcctgtccggaggcgcgcagaccgtgcgcatgaacgcgccgcgcgtggggggcagcttcgccgtctggggcggcctcttctccaccttcgactgcgccatggtgtacgcgcgccagaaggaggacccttggaactccatcgttgcgggcgcagccacgggcgggttcctctctatgcgccagggcatgggggccgcgggccggtccgcgctcatgggcggcatcctgctggccctcatcgagggcgccggactcatgctcaaccgcgtcctcgccaacccgccgctgcccgccgacgatcccaaccttacagcggccatgggcggcaaccctttcccgggcctaccgcaggcgccgccggtcgtggcacctccggaagcgacgacctccagcggcgtgggtggcttgttcgggggactgtttggcaggaaggaggaggagaagaaacccagcgcaggcgggggcaagtcggagatcttagagagcttcgatacgcccagcagtccgataccatcgttcgagtacaag

SEQ ID NO: 5370 - DNA, 423 bp, Zea mays
atgtacatggtgccgatggtggaggacagcaccaggcgccgcacgccggcgtccgccgccgcctccacgacgttccgcgtcccggcgataatcggctcgatgatctcctcggggttgtcgtgcatcggcgaggcggtgtggatgacgccgtcgcagccgcggaaggcggcgcggaggctggcgcggtcgagcaggtccacctgcagcatggtgaggcgctccgccgcgccgtcgagcgcccacaggtgcgcgttcttggggtcagcagcttcgcggcgggaggtgccccggacggcgtacccgcgggcgaggaggatcttgacgatccacgagccgatgaagccgccggcgccggtgacgcacacgacggcggccatcgcgcgctgtcgcccagtcccttcttcttcctcctcctctcgagcg

SEQ ID NO: 5371 - DNA, 585 bp, Zea mays
atggccctgccccgccgacctcgggtacgaggccaactgccgggaggtggtggagcgggtggcgtcggcgtacggcgggcgcatcgacgtggtggtgaacaacgcggcggagcagtacgagcgggagagcatccgggacgtgacggaggcggacctggagcgcgtgtccccccccaacatcttctcctacttcttggtgtccaagcacgcggtgccgcgcatggagcccggcgcttgcatcatcaacccttcctccgtcaacgcgtacaagggcaacaagacgctgttggactaccacggccaccaaagggcgccatcgtggccttcacgcgcgcgctctcgctgcagctggccgacaggggcatccgcgtcaacggcgtcgcgccgggccccgtctggacgccgctcatcccggcgtccttcggcaaggagaaggtggagcagttcgggtcccaggtgcccatgaagcgcgccgcgcagccggccgagatcgcgcccagcttcgtcttcctcgccagcaaccaggattcgtcctacatgtccggccagatcctccacgtcaacggaggcgtcatcgtcaatagc

SEQ ID NO: 5372 - DNA, 462 bp, Zea mays
atgtgcgccgtggtgttcggcgacacgtcccggcacggcctccgccgccccgccatcgggcccttcaccatgaagctcaccaccccgggctaccccgtcgtggacgtcggcacctacgccaagatcaggagcggcgagatccgggtgctccccgccgccgtcaagagcgtccgcgggaacgtcgtcgagttcggggacggcagccgccaccctttcgacgccatcgtcttcgccaccggctaccggagcactgtcaggcggtggctcaagagcgaggacgggctggtcggtgacgacgggatggcggcgcggagctacccggagcactggaagggggaccacgggctgtactgcgcggggatggtgcggaggggcatctacggcagctgcgaggacgcggagctcatcgccgccgacatcagcaagctgctgcaccccaagcaggagcagggcaacggcgtc

SEQ ID NO: 5373 - DNA, 372 bp, Zea mays
atgcacgagcaagcatcagcgatcgtcaggtatgagctaagtcgaatatcagctggtgtgttcattgcacttggtaaaggaaaagtgcagtgtcgtggtgacgtacgaagcctcctctttcatggatggttcagcacaatgttgttggattttggctggcttcagcgctgccccaaaggtctcgacctaagatcgttggaggagaatttagggcgaggccttttaaccctccctctcaggcagcagcaatgtttgttcgaggaatggttccagttctatgcgaccaaaggacccgagtgtccgaaccttattagagctttccaggtatggtggagaaggtctttcattagatcattggtagaacctcaaaac

SEQ ID NO: 5374 - DNA, 309 bp, Zea mays
atgcgccgtctgcttgccctgccggattggattgcccgcagacgaacccagcagtttatttccttcgcttctctatctggacgagcatccgctgggtgcttgatgcagttgcagtgcaactactctagggcagtgatcgctccatctcagtttgcagagctgtccttgattgtgaaaaggacactggagtcaaaaacttgttggcctgcagtaaccttcaggccactcacgtatccggcacgaggcgccttcacaacatgctccatcttcattgcttccataaccatgacaggctgccctgcgtccacc

SEQ ID NO: 5375 - DNA, 906 bp, Zea mays
atggcggcggtggcggagggatcggcgtctgctgcggcgaaggaggtggagtaccaggcgggcgtgcagaagcttgtggacctgctctccaatcttaacccggccgccaaggagttcgttccttcctcggctccggccgcggctgcgtcgccgcccaagaaagcgttgtcggcggatgcgccggtcttcgattaccgctccaccgcaggcggcaacggggccaccgacgatcccttttacgttgggtttgggaaccagcagcgcaagagagggaatggatacatcaaccaaggaaggaggaggacaaatgataggttgaggcgtgcagacagagaggacagcgttaggcgaactgtttatgtctctgaacttgatcatactgtgacagaggagagacttgctgatatctttgctacctgtgggcatgttgttgattgcagaatttgtggtgatccccactcagttcttaggtttgcatttattgagttctctgatgaagagggtgcaagaactgcacttaacctcggaggcacaatttttggtttctaccctgttagagttttgccttcaaagacagctatcttacccgttaatccaaagtttcttcccaggacggacgatgagaaggaaatggtcatgcgaactgtctattgtacaaacatagataagatggttactcaattagatgtaaagaaattctttgaagaactttgcggtgaggtctctcggttgagacttctaggagacaatgtacattccacaaggattgcttttgttgagtttgttcatgctgagggtgccatcatggctctgaattgcagcgggatgattttgggaactctgcctgtcagggtgagtccttctaagactccggtgaagccacgtgtaaatcgaatgggatctaac

SEQ ID NO: 5376 - DNA, 540 bp, Zea mays
atggatgcatacatacacaggaaggatctggctgagctctgttgctcagcaggcgacgaactggtagtcgacgttgaggtggcccatctggtagccctgcccgttggtgtcgatcttcttgaacaccgtctcgtagtccaggtccaggccgccgttgctgcactggtccacgatcctcgccatgatgacgcgcccgtcgcacggttcttcacccttatgcacttgccgcaggcggcctggcccttctgcccggcgggcccgcagaaggccgtccagccgtgcttctgccgccacgacagcggcttgtcggcgtcccacgtggcgcagtacgcgctcacgcggttcaggtcccacccgttctgcgccgggttgtacaggtggtacgtcgcccgcacgttcgacgcctgctgcgccgccgccatggccgccaccgcgcagagcacgcccgccaccgccagcgccgcccgtcctccggagaccatcatcgccgccgcagcagccatcgtcgttgcctcttttctttgccaaactaacgatata

SEQ ID NO: 5377 - DNA, 495 bp, Zea mays
atggagctttcattggtagggctccaaaatgctgggaaaacatcacttgtgaactccattgctactggaggttttagtgaggatatgatccctactgtaggattcaatatgagaaaggttaccaaagggaatgtgacgataaaattgtgggatattggaggccaacctagattccggagcatgtgggagagatactgccgtgcggtttctgcaattgtgtatgttgttgacgcggcagatcgtgaaaacatggccattgcaaaaggggagctccatgatctcttgagcaagccatctttgaccggaataccattactagtaattggcaacaaaattgacaagcctgaagctttccctaaacaaaccttcacagaaataatgggcctaaagacgatcactgaccgagaagtggcatgcttcatgacatcatgcaagaactcgaccaacattgattctgtcattgactggctggtgaagaactcgaaaaagaagaat

SEQ ID NO: 5378 - DNA, 258 bp, Zea mays
atgggcagctcgatggcggcagccgctgctgcgcccttggagccgcctgatgctgagacatcggccacgctgtccttgctcttgccccagatgagcgcgtacagacctaacacgatgatcgcagcgccaatcacgcttccgagagtgatctcttctttgagtatgatggagcccatgacggcggtgatgatcatgcagagagggttgaaggccgtgacgaacaccgggcctcgttgcctggacacgatgccttgcacg

SEQ ID NO: 5379 - DNA, 258 bp, Zea mays
atgcatttaggttctgagatttatcaggaaacattggtaaaggcacttgctaaacattttggtgctagacttcttgtcttggattcacttttgctaccttgggtaagctcatactgtatatttatttacctgctcatgaacattcagaagctaagaaactttgaattattgcacgttctattacaattttcctatactgaacatgagacttctcataggcaacccagttatgagcttgcttttgtattgactatcctg

SEQ ID NO: 5380 - DNA, 252 bp, Zea mays
atgaactgcggtcgccctgtcgtcgccggccgcttcgccccgcacctcgagaagtgcatgggcaagggacggagagcccgaacgaaaattacaaggagcagtacggctgggcgcatgagaagcagcaatggcagcgttgccactccctactctccatactccaccacggcgaaccctaatagggcaagcatccctaatggtgtgactgacggcggcggcggcgcaaggggagattacagcaaccatgcgccc

SEQ ID NO: 5381 - DNA, 399 bp, Zea mays
atgaggaggaagaagaagaagcaaacggttaagaacactgctagctgctcgatcgaggccgaccgaccctcctcgtgcatgcggagttgcatggaggcggatcggtcgacgcacccgccaccgcgcaaacctgacacctttgctaagaaatcccatcggcgttcgccgaacaggcgcacgaaccgtaccagctgctcgtcctcctcgtccgtccacgggcccttcctcatggccgcgccgcccgtgctgatgatgatctgctcgccaccgtactctccatcgccatcgctgtccttcttgttgttcctgcggctaatacatagcaaggacgacatggtcgatcgatcgatcgatcggtcgctagaccgtaccaggcagctagaaagcaaggaccaagct

SEQ ID NO: 5382 - DNA, 1284 bp, Zea mays
atgtcccccgccaccaccccgttgcccgcccccgtggcagccccagcgtccaagggcgggaaacgcagcctcatgtcgtcactcatggacgccaccgcgctgctccgctcctcctccttcaaggaggactcgtacgtggcggcggcgctcccggcgtccgagctccgcgcgctcgccgacctcaaggcgctggtggccacccacccggaccccatctccatctggggcgtcccgctgaatccccactcccctcctcccggcgcggcgaacgacgacgccgacgagcgcgccgacgtggtgctcctcaagttcctccgcgcgcgggacttccgcgcgcgcgacgcgcacgcgatgctgctccgctgcgccgcgtggcgcgccgagttcggcgcggacgcggtggtggacgaggagctgggcttcaaggagctggagggcgtggtggcgtacatgcacgggtgggaccgggacgggcaccccgtgtgctacaacgcgtacggcgtgttcaaggacagggccatgtacgagcgcgccttcggcgacggcgaccgcctggcgcgcttcctccggtggcgcgtccaggtgatggagcgcggcgtgcgcgcgctcacgctcaggccccgcggcgtcaacgccatcatacaggtgaccgacctgagggacatgccgaagcgggagctcagagccgccagcaaccagatcctctccctcttccaggacaactacccggagatggtggcgcgcaaggtgttcatcaacgtgccgtggtacttctccgtgctcttctccatggtctcgcccttcctcacggagcgcaccaagagcaagttcgtcatcgctcgcgagggcaacgtcgccgagacgctgtacaagttcatccggccggagctggtgccggtgcagtacggcgggctgagccgcgccggcgagctcgagaacggaccgccgaagccggcgtccgagttcaccatcaagggtggcgagaaggtgttcctggagatcgacggtatcgaggccggcgcaacgataacgtgggacctcgtcgtcgggggctgggacctggagtacggcgccgagtacgtgccggcggccgacggcagctacaccctctgcgtggagaaggcgaggacggtcccggccacaaccgccgacgccgacgccgggccgctgcacaacgccttcacggctcgggaggccggcaggatggtgctgtccatagacaactccggttcccggaagcggaaggtcgccgcctaccgctacttcgtgcgcaagccgtcggcg

SEQ ID NO: 5383 - DNA, 330 bp, Zea mays
atggtatcctcccagctcacgggctcctccgacgtagcccaacgttcagaggaatggtttgctcttcgcaaggacaagctcaccacaagcaccttcagtactgctttgggtttctgggctggcaacagaagaccagagctgtggaacgagaaagtcttcggagcgacagagatcaagctagcagatgccgctagatctgccatggactgggggacgcatcacgaaagcgtagccatagagcagtacacgagcatcacaggaagacccggtgggcaccctcggcttcgcggtgcacaccgaggccagcttcggatggctcggagcctcgcc

SEQ ID NO: 5384 - DNA, 456 bp, Zea mays
atggacacgctggtcggcagcgtctcgaggctcgaaaccgacctcgagaaggtgacgctcgtctcccggctcaggcagacgtgtcccggtgacgatcaggtctcaagcgagaagttcttcgaggcgaacgacgcgttcctcggacgtgctcacgcggagatcgaggcagtgaaggcggccggggagcgcgcgctgcagcgcgtcaaggagaccacggagtacttccacggggacgccgtcaaggaggagcctcacccgctgaggatcttcatggtggtgcgcgacttcctcgcgacgctggaccgcgtgtgccgggccgtcggcaggacgccggagagggtgatgatggggtccggcaagtcgttccgcgtctcggcgggcacaacctccctgccgcagcgccggaacgaccagcggagggagctgagctcctctgacgaggacagctcctcgtca

SEQ ID NO: 5385 - DNA, 600 bp, Zea mays
atggacgagaccgcccgcctctgggacgcctgcctcgccgtcaaactcggcctcgcctccgtcgagcggtattgcgcagcggcctcgtgcgccgccgcggcgctggatgactggctccaggatccctcccctctgtccagtagccaggtgatgcgggcgatctccgtgtcgaggagggaggccatggccgcggaggaggagaaccgcgcgctggcggacgcgaggatcgcgccgctctcgctgcagctggacgagcggcttctgctgcgcgcgacggacgccaggcttacgggcttcaacggcttccgggggctgctgcacgcgctccacagcgcggagctcgctcctcctgctcatccgcgccagcggggccgtctcgagcgaccgccgtggcggcggcccgtgccgcgcggacgacgccgcgggaacggtttcgccggtctctatcgcggtgttggtagcaagcggctgggggttgggagccaccatgacgcgcgagtcggtccgcggatgagagcccgcgggccctcgttgtgtacgggttatcgcgctgaacaatgccgcgatattttcgcgatcgcgaagagattgtacgtcgat

SEQ ID NO: 5386 - DNA, 423 bp, Zea mays
atgcaccatggtagtacgtactacagaccctaccgctacgctacgctgtccttggaacgacagcggcgtaccgcgtacgcagcgcgcgaagaagctagctataccgacgaggcgacgacggcaagatcgggtcgagagggtagtagtagccgccggggaggtggagctggtcggcgccggcgaggtcggggcccgcgcagaagtccagcaggaagagggacgcttcgcctgcgccgttctccgccgccgaccagttgttggaggccgacgacgccgcggaggcggccgaggtggagccgtcggcggcggcggcggcggcggcgaacgggtccccgaggccgagcgccggcgccaggaagtcgtcgcaggtgtacgcctcggtcttcacggtcggtatggcgagcgacgggaacagcgaggacg

SEQ ID NO: 5387 - DNA, 828 bp, Zea mays
atggcctactactcgggcggcggcaagctgtcggcggtggacgccatcctggcggaggcggcggacctggtggcgctcgagcaggtcgccaagctcaacacggcccacctcgatgacgactccgcgcttccgtccagcctcgaggcccgcttccgcaagctcaagtccctcccctcgcccgccgcagtgccgcccgtcagcaccctcgcccgcagcgccaccgcgccgcgcccggcccccgctctgcccggccccgatcctcccgctcctgctccgcctgtgcatcacccggtccacgaagacccgccgccgggagacgcggagacgaagggcggcgggtcctcgccgcggcaggctcgcgccccggcacccgcacccacggtccacgccgacgacgccaaggacctagatcagctgttcgggtcggcgccgcggggccggccgacactgcgggagcggaacagggggagcgactcctcctccgtctccccctcgccgctgccgccgccgcgccaggcgtgctgcttcggcttctcccccaagaagcccctgcggagggcgccgtcggccaagggcaagaagaaggaggtctgccacgggtcccgcgacgtcctcggcgtcgacgccgacgagtggggcgacgagaacaggaggatcgccaccgagctcagggagcagcagcgccggctcaggaaggcgctggaggaccaggtgcaggtcagcagggagaccgccaagatggcgcgctgggtcaagcaggcgtccgcgcgcatgacgcacgccgaggccatcgacgacctgctcagtgactgcgaggacgacctcaaa

SEQ ID NO: 5388 - DNA, 225 bp, Zea mays
atgagagaaatagaggaatgtcggattagtggcaccatccttgtaataggcgaataccacggacgcttcgtccttcatgctctcaccaacaaaaaattgaaggtccttcagcttgctaaggagaaacttggttgcaccctcgacaccctttttgaactcatccgctttctctggctccaacacagcagtgagattcttgatgtatttttttatgtaagagacaaa

SEQ ID NO: 5389 - DNA, 480 bp, Zea mays
atgtcggactcggaggagcaccacttcgaatcgaaggccgacgccggagcgtccaagacctacccgcagcaggctggcaccgtccgtaagaacggcttcatcgtcatcaagaaccgcccctgcaaggttgtggaggtttctacctcaaagactggtaagcatggccatgccaaatgccactttgttgccatagacatattcaacgggaaaaagctcgaagatattgttccttcgtcacacaactgtgatattccgcatgtgaaccgtactgagtaccagctgattgatatatcagaggatggatttgtgagccttcttacttcagatggcaacactaaggatgatcttagactcccaactgatgagactcttgtggcccagatcaaggaagggtttgaaagcggcaaggatcttgttgtgactgtccagtctgctatgggggaggagcagatctgcgcgctgaaggatgttggccccaag

SEQ ID NO: 5390 - DNA, 627 bp, Zea mays
  misc_feature (618)..(618): n = any nucleotide
atggctaactcaaataaagccaggaaggcacagaggatgcagtatgttccgacaatcactaatcatactcaagtttggtgggttcctaatgttgttgttgtacatgaaaaggaagggatagaggttgtccatctagcttctggacgtacaatatgcaagcttcatttaaatgaaggaggccttcatgcagatattaatggagatggagttctggatcatgtccaggttgttggtggaaatggtattaaagagcagactgtcgtgagtggatcaatggaagtgctgaaaccctgttgggcagtcgctacatccggtgtgccagtgcgggagcaactttttaacgtctctatctgccattacaaccattttaatctgttccatcatggtgacttctcgagaagttttgggaggacatttgatacagctggtttagaggtcgcgactcctatcctggtccagacagacgatgggcataaacacaggagaggaagccatggtgatatcatctttttgacaagccggggagaggtgacatcgtactctcctgggctgctcggccatgatgccgtgtggagatgggcagtatcatcaggggcgacatggtccacccttcatctncatcgggaa

SEQ ID NO: 5391 - DNA, 1032 bp, Zea mays
atgctaagtcgtctacatcaccgcaaccttgtcaagctgattggtatatgcattgagcggagcacaaggtgcttggtttttgagctcgttccaaacggaagtgttgaatctcatctacatggctcagataaaatatatggcccgactgattttgacactagaatgaaaatagccctcggcgcagcaaggggactagcctatctgcatgaggacgccaaccctcatgtcattcaccgggatttcaaggctagcaatgttctactggaaaacgatttcacccccaaggttgctgattttgggctggcaaaggaagcatcagatgggatggatcatatttctactcaggtcatggggactttcgggtacgttgccccagagtatgcgatgacagggcatctgcttgtcaagagcgacgtctacagctacggagtggtgctcctggagctgctgtcaggccgaaaacccgtggacatgacccagccgccggggtccgagaacctggtcacctgggcgcgcccgctcctcaccacgcgggaaggactgcagcggctggtggacccgtcgctcccggccggttacgacttcgagaagctggccaaggcggcggccatcgcgtccatgtgcgtgcacgtcgaggcgtcgcaccggccgttcatgggcgaggtcgtgcaggcgctgaagctgatccacagcggcggaggcggcgacgagacctgcagcggctccttcgtgggcggcgcaacagaggagtccccgtggaacgacgtcagcaggagctcgtggaacgacgacccgccggccactccgggcccggcgctccccctgggatacggctcggaccctgccggcgccgacgagcgcaggccacggtcggcgtcgagcgcggtgctggacaagatcgagtccctggcgatgtacgactggtccggcccgctgcgcaccaaggggaggggcagcttctacaggctgagggggagcatgagcgagcacggtcgcccctcggacgacggtagcgtcgaaggttacttgatg

SEQ ID NO: 5392 - DNA, 987 bp, Zea mays
  misc_feature (876)..(876): n = any nucleotide
atggcagaccagttagggtcttacacaattagatcccatggaatgatattggcaagattacacatgtatgactggataatacttctcctccttgctgtcatagacgggctgttgaatataattgaaccatttcaccgttttgttggaaaagacatgatgaccgacttgagatatcctatgaagggcaatacagtgccattttgggctgttccactgattggaattatactgccttgggccatctttgttggaatttacttcaagaagaacaatttttatgatctgcaccatggcatactggggattctatactcagtgctcataactgcagtgattactgatgcaattaaggatggtgttggacggcctcgtccagattttttctggcgctgtttccctgatggaaatgatgtttatgataacatcactactggtgttatatgcaatggagtgaagagcgtaatcaaggaaggccacaagagctttcccagtggacacacttcatggtcttttgctggtctaggcttccttgcatggtacttagctgggaaactcacggcttttgatcgcaaaggacatattcggaagctatgcattgtgtttctgcctcttcttactgctgcgcttgtggctgtttctcgagtggatgactactggcatcattggcaagatgtatttgcagggggtcttataggtcttacagttgcttcattttgctatctacagttttttccatatccttttgatggcgagggaccgaacaactccccggttttaccaagctatatagtgagttggcaggctttgttcaacaagacgcagaatattggacatcaactcggcagctttgtggcctcacgcagacactgtccagtnagccgaggaagggagcagcagaaatacaaactcctacagcgtgagaccagccgagatcgaaacagtcaatattcctggtcacggtgggatcaccctaagagatactctaaa

SEQ ID NO: 5393 - DNA, 939 bp, Zea mays
atgtacacgagccttgctccgcacggtcccctgaagctgtaccacttcgtcatcatggtggccgtggtgctggcctttctctcccagctaccgtctttccactcgctgcggcacatcaacttcgtctcgctgctcctgagcctgggctacacagtcctcgtggcagccgcctgcgttcgtgctggtttgtccaagaatagtcctgcgaaggactactcgctaagctcgtccaagtccgagcagtccttcgacgctttcctgtccatttccatccttgcctccgtcttcggcaacggcatactgcctgaaatccaggcgacgttggcgccaccggcagcggggaagatgatgaaggcgctggtgctgtgctactccgtcatcgtcttcaccttcttcctctcgtcgatcacgggctactgggccttcggcagcaacgtgcagtccaacgtcctcaagagcctgatgccggactcaggccccgccctcgccccgacgtggctgctgggcgtcgcggtcctcttcgtcctcctccagctgctcgccatcggcctcgtctactcccaggtggcgtacgagatcatggagaagggatccgccgacgccgcccggggccgcttctcgcgccggaacctcgtcccgcgcctgctgctgcgcacgctctacctggccttctgcgcgctcatggccgccatgctccccttcttcggcgacatcgtgggcgtggtcggcgccgtcggcttcgtcccgctcgacttcgtgctccccgtcctcatgtacaacatggcgctcgcgccgccgcgccgctccccggtcttcatcgccaacgcggccgtcatggtcgtgttcgccggcgtaggggccatcggcgccttcgccaccatccgcaagctcgtgctggacgccgacaagtttaagctcttcaaaaacaaagttgtcgac

SEQ ID NO: 5394 - DNA, 234 bp, Zea mays
atggtgattgggtggagcatgcattgcctcaacagtacatccatagtttcaaggatgggcagttcaccacttcaccagtttcacactcaggagcgtgaatacaattgttactgctgttgttttttgttgcccttgctcagtccgcggtgtgtatgtcctgcatgcacgtggttcctttctgttggtgtttttgtgtgccaacaaaccaccaaacttggtttgtatgtctttagc

SEQ ID NO: 5395 - DNA, 261 bp, Zea mays
atgagtacagctctgggacttttacactgtccaactggtatgtttggtgtaaatcggtttgatgcaatccttccacctggccagggagctattatggctgttggagcctcgaaacctacagttgtggctgataaagatgtttctttagcgtcaagagcaaaatgctggtcaatgtcactgctgatcacaggattgtatatggggctgatttggcagcattcctacaaacttttgcaaaggttattgaggatcctgagagct

SEQ ID NO: 5396 - DNA, 585 bp, Zea mays
atgtcaccgttcgacacgtactgcagcgtgattgcacgcgccgccgccgcccacgtgcacgcgcgcgccgggcccgtcgatcgtcttgtagctgttcaccagcagctcttcgttcagccggatggccatgtccgacgcgaacacgatccacagcgggccctcctggatggcggcgtgccggagcgtgccaggggacgggttcacggggtcgcggtccgacgggtccgtcaccacgtacaccggcccgcccttgccgcccagcgcgttgcgcccgaacccgatgccgcagtccgccagccgctgccggtcctgccgccagtccgtccccgcgcaccgccagcagtcgtcgattgggttgcccgtcaagcacccgccgccgccgccgccgccaccgccgccggactcctgcatccgccgccgcgacgttgccaccttgctgtgcaagtcggcgacgacggcagcggggtcggggagcgaggagttgaggagaggaaaggccgaggctttggcggcggctgccagcagcaggagggagagggcaatgccggcggatttgggagctcgggccatggttccttggcggat

SEQ ID NO: 5397 - DNA, 210 bp, Zea mays
atgctggaggggagggcgcgggtggaggacacggacatgccggcgcggatgcaggacgcggcgacctccgcggcctcgcgcgcgctcgacctcttcgacgtcgccgactgccgcgccatcgccggccacatcaagacggcacgttctctctcctctcctctcctctctctgctctgccgccgtcctcgtgtcacatttttaattgatgga

SEQ ID NO: 5398 - DNA, 333 bp, Zea mays
atggagaacctaaaggagcagcggggccacgacgcggcgggcgccaacgcctggatgacggtgccggcgttcggggactgggacacgaagaacggcgcgctgccggactactccatggacttctccaagatccgcgagatgcgcaagcagaacaagaaggagctctcccgcgccagcctcggcggcgacgacgacctcctcgcccacgcccagaagccgcagcccagtatcgccccgcccaagctcggccgcccccgccccggccccgccgacgaccactccccaacgggagggaagaagttcctgagctacttccggtgttgtatcaaggcc

SEQ ID NO: 5399 - DNA, 252 bp, Zea mays
atgcagcttggacagcctgacgcttttcatgccgtgcttcccatcccaggcagcagcaatcttcaatggtatcatgacgagccgactgggatcagcttgacggcggcagcgatgggcatcccggccagaccgaggagcacgctggctagccactggtgtatggtcaggggcgtcgtgttggcgaactctcctagaaactgcaccatgatgaactggaagatcaccgtgctgctgaggacagccatgaacacg

SEQ ID NO: 5400 - DNA, 369 bp, Zea mays
atggcccgtatcaaggtgcacgagctccgggggaagagcaagacggacctgcaggcgcagctcaaggagctgaagtctgagctctccctcctccgcgtagccaaggtcaccggcggcgcacccaacaagctctccaagatcaaggtggtgcgcacctcgatcgcgcgcgtgctcacagtgatctcgcagaagcagaagtcggcgttgcgggaggcgtacaagaagaagaacctgctccccctcgacctccgccctaagaagacccgtgccatccgccgccgtctgaccaagcaccagctctctctgaagaccgagagggaaaagaagcgtgagaagtacttccccatgaggaagtatgctatcaaggcc

SEQ ID NO: 5401 - DNA, 591 bp, Zea mays
atggagctctgcgtctctacacccccatcctccgtccgcgccaccgccgcgcccatatccttcgccccgccccgacgtggcgcgtctgcctccaccgccgttccgccccaccgccgcatcccaactcgaggctggcgctgcgccagcgcggccgtgcctggcccggtgccctccgaagagccggcatccgcctcctacgccgtcgtcgtctcggacaagcccgatacgcctgccgacgacaaggccgaggaggttagcgccgcgcctagtggctccgcggaggcgcctatggcagagctagtgccgtcagaggcgtccccgtccccagatgatggcggcctggatgagattctaagcaagttgaacattgaagtgtctccaactttaatcctcactggatttggtgcttttattgctttatggatcctatcttctgttgttgctgcagttgattcagtccccctgctcccaaaattgctggaattaataggaactgcttacacaatttggttcatcgcacggtatctccttttcaaggaaagcagagatgacctgtttgcaaagttcgaagatctcaaacagaggattatt

SEQ ID NO: 5402 - DNA, 456 bp, Zea mays
atgatttatctgctgaacaatttgcaccttgccggaggcggcgccaaacccaccgatgtcggcgtggtcatcgtcgtagtggcgggcgtcggcctcggcgtcgtcgaggggcagctggacctgcgcgagcatgaggtagttgggctcgttgtcagaggtgtgcgtgccaaggatcatcttctggacggagtggtccttccccggcggctcggtgcggtcggggagccactgcacggtaagggagggccattcgagcgcgtgggtgatgacgaggtcgtagaggaagggtgtgttcttcttccagatcttgtactcctcgttgatgaggcgctcctccacctcggcgcggaactcctcttcgtccgccgccccgccgcctgccttcggcatcgtcggtccgccgggagcgggctagggctagggttagggtttgagagcggagggggtttgagttgg

SEQ ID NO: 5403 - DNA, 276 bp, Zea mays
atgtctgacatccaatcaccactgctgaacaaaggcagttggccacctttaggttcaagtggcaatacagtaggatccacattagcatcaacagtacttgatgatccagctgttcgattcaggccgagttttcgattagaatttaacgaattgcctttccaacttaagatatctgctggaataagagcaccaggagcagccatcagatcaaccaaaaactccctttcattgtccatcttaattatgtttatagcatcgtcgtcatcaccaccagta

SEQ ID NO: 5404 - DNA, 786 bp, Zea mays
atggacccggcgctcaagaccgacgccaaccgcgtccggggttgcgtctcacaggtctgggtccacgccgagcccgacgagggcgacgccggccgccgcagcgtcaggttccacgccgactccgacgcgcagctcaccaagggcctcgccgcgctgctcgtgctagggctctctggcgcgcccgccgcggatgtggccagggtgcccgttgacttcatcgagctgctcgggatcaggcagagcctctctccctccaggaacagcggcctgctcaacatgctcagcctcatgaagcgcaaggcacttgagatcgccggtggtgactcaacgtcaagtcagcaatctgtccaagaggttaccagaccgcgtctagtgaacgggaaagagcctgaatttgcagctttcgaggtgcaagaaaaggaaaaggaaaggccacaggatgcagagaggcgcgacgaggatgaacaattgggtcaacttctaccacttgatgcagaagtgaatggtgctgcgggcggtgggaggaaggagaggataagggagagtttggagagggcactttctccggtagagttggagattgaagacatatcacacctccacaagggccatgctggcgtggctgggaccaatggggagacacatttcaatgtgagggtggtgtccaaggagtttgaggggaagagcttgctcaagaggcacagggctgtctatgatctcctgcaggaggagctcaagaccgggttgcacgccctgtcaatcgatgcaaagactccatctgaagtt

SEQ ID NO: 5405 - DNA, 297 bp, Zea mays
atggtggcggcgcgcgtcttccagctcacgcgtgaactcggacaccgcaccgacggagagaccatcgagtggttgctgcgccaggccgagccttccataatcgccgccaccggcaccggtgtcacgaccgaggaggcgccgtcgtctctcgtccccgtctcctccatcgcgtcctcagtgtcccttacgccggtcccgtactacaccgcgctcctcatgcaaccaccgcccaccgccaatgagtcccctgtcgcctctgcatccgtatctggcactgttgcggaggagaataacaac

SEQ ID NO: 5406 - DNA, 402 bp, Zea mays
atggctggcgctggggacgagtactactacggcgggccggggcaggggcaggggccgcgcggcgccccacacggcctgctgctggcggtggtggttggcctcgtggtggcgggcccgctgtttctgggcgacggcggcgaggcgctgacggaggccgtggcggagctgctgagcccggtcgggctgcttctcctccccgtgtgcctgctgttcctcatccgcctcctctcctccgaccgcggcgccgcggcgctcgccgacgtcttcgccttcggcgggtcccccgacgccgtccaccgcgtcggagggtcccccgtcggcgtcgcgctcatgctcctcctcatcctcgcgctgctctactaccgctcctcgctcttcggcggcggcggcgacgacgacgag

SEQ ID NO: 5407 - DNA, 417 bp, Zea mays
atgacgtgtgcgccgctgcagcgtgccagcgtcagcggcggcttgtggttccgcaggtactgcaggaacgtgttccagtcccggcgcttctgcgactcgtaccggctgagccccgccggaggctgctgcgttagcggctgcggctgcggctgcgcctgggcccttactgctggctgttccctctgctgtgctccttgttgctgctgtgcttcctgctctgcctgctgccggctcgacgaggaggctgctgcggcggccgaggacgacgacggcgacggcccggcctctgctggctcactggttcctcctccgccaccaccaccggcaggcgcgtccggaccaggctccatggccagcaactccccgatcgatccgttagcagctctccctgcctgctgccgtttaagtgtagccgtt

SEQ ID NO: 5408 - DNA, 396 bp, Zea mays
atggaaggtcgcgttcttcagggacgagctcgggtggacggaggcgcaggtgaagacggcagctgcgaagatgccgacgctgatgacggtctccgcggagcggatccggaggaactgggagttcctgaccacagaggtcgggatggacgcggagcgcgtggccagcttcccggcgctgctgaggtacgacctggaggggcggctggtgccgcggttccaggtgatgagggtgctgcaggcgcggcggctgtggcgcggcagggacttcaacaacatcgctgccatcacggaggaggatttcgtggccaagttcatcaggccatttctggtcaaagtcccaagcttggccaagatctacgaggccgctgtcatcgagaaggaagaacagtagcggga

SEQ ID NO: 5409 - DNA, 678 bp, Zea mays
  misc_feature (581)..(581): n = any nucleotide
  misc_feature (637)..(637): n = any nucleotide
atgaacctgtccacgttgcgcatagagcgtccgttgagcttcgccgcggccacggcgctccccttaagctccgtgacgcggcggcgcatgtcccgccctttctccccctccatggcctcccgtatgagcgccttcacctcgccccgccggacgtcattaccgatctccatcccgatgccccactcggtgcgcttgtaccggcagttggtctgctgctcagcgaagaagggccagcacaccatgggcacgccgccacagatgctctcaatcgtggagttccacccggagtgcgtcaagaacaaccccacggcctcgtgctccagcacctctgcctgcgggcaccacgtcgacagcatgctccggccctccgtcgcggccagaaactccggtggcagccccgcgccggcggagtcgccgccccttgacgaggtccgggcgcacgttccagagggaggtgtagcgggtgttggccaacccccacgcgaactcgaccagctgctcgttggacatcaccgtgacgctcccgaagttgatgtacacgaccgagcgcggggcgcggtcgtcgagccaccgggagcggngcctcctgttccttccataggtgggcacccgatggccggaacgggctgtccgccgnggacgttgttccgcaccgtcagcaggagcgggcccacggtg

SEQ ID NO: 5410 - DNA, 825 bp, Zea mays
atggaattcacggcccaggagggggaggagcccgtctcggaggagatgggcgcgagctccgcgccgccgccctgcctcggccccggccgcggcccggggaaccagaaccacgccgccgaggcgacgtaccacgagtgtctgcgcaaccacgcggcggcgctgggcggacacgtcgtcgatggctgcggcgagttcatgcccgaggacgccgacaggctcaagtgcgcagcctgcggctgccaccgcagcttccaccgcaagggcgacgcggggcgccgccaccagctcctgctgccgccgcccgccgcggcggtcccgcgcgtcccgctgctcctgcctccgccccacccctacgcggccggcgctgcccacccccactacgcgtcgccgccgctgttcccgtaccacggcacgcccagcggcaccacgaccgagtcgtccagcgaggagcgtggcccgccgtgccgggttcgccgccgcgccgcacgcgcacgcgcagggccacgtccggcggaagcggatccggaccaagttcacgccggagcagaaggagcagatgctggcgttcgcggaacgcctcggctggcggatgcagaagcaggacgacgcgctggtgcagcacttctgcgaccaggtcggcgtccggcggcaggtcttcaaggtctggatgcacaacaacaagcacatcggcagcggcggcaggaggcagccgccgccgcacctgccgcctcccgaggggcagcaacagccccagcagccccagtagccacggtgggagacaaggctcagcagtcagcagcaccaccaccaccaccaccatttgct

SEQ ID NO: 5411 - DNA, 177 bp, Zea mays
atgcttaattgcattgatcgatcaacatctgctgcagcaagcttatctgcaggatccaagtccttcagagtggccagtttcttaaggagggaactcctttccacacagcagattaattcctcatggcttggatctgaagcagctgcagtactccgtaaagcaatgtcaagcagagac

SEQ ID NO: 5412 - DNA, 624 bp, Zea mays
atggatcagagcttcgggaatctcggggccggagctgggagcagcagcgggggctccaactccaaggcggcggcagccgccgtgtcctcctcgtctttcctgcagctgccgctgtcgacggcgtcccccgcgtactacggcgcgccgctcgcgctcctgcaccacgccgccgcggccccgtcgtcgtcgcagcagcaccagcagcagcagcaccaccaccactacgccaggcacggcgccgagatgtcggcagcggaggccgaggccatcaaggccaagatcgtggcgcacccgcagtactcggcgctcctcgccgcctacctcgactgccagaaagtgggcgcgccgccggacgtgctggagaggctgacggccatggcggcaaagctggacgcgcgcccgccgggccgccacgagccgcgcgacccggagctggaccagttcatggaggcgtactgtaacatgctcgtcaagtaccgggaggagctcacccggccgatcgacgagggcatggagttcctcaagcgggtggaggcgcagctcgactgcatctccggcggcggcggatcctcctcagggcgcctctcgctcgccgatggtaaaatcagaaggtgttggctcttc

SEQ ID NO: 5413 - DNA, 600 bp, Zea mays
atggatcgcctgcccgagtcgacccggagcatgaggaagtacgcgtcggaggccggcgggctgcgcgcggcgcggcagggcccccacgggcggtcgctgacggcgcgcacggcgcacagcatgtccacgacggcgctgcgcaccaagtccaagtcggccgcgtcgctgctgcgcagggtgcccttcgcgccgctccgccccgtcctcgccaacctgcaggaggtgttcctcggcaccaagctcgccgtgctattccccgccgtgccgctcgccatcgccgcccagtgcgcgcacttcggccaggtgtgggtgttttcgctcagcctactcggcctcatccccctcgccgagcgtgtcagcttcctcaccgagcagatcgcgatatacaccggccccaccgtggggcggcctcctcaacgcgacgtgcgccatacccccggagctcatcatctcgctcttcgcgctcatggagggttcatattaaggtctgtaagtgttccctccttcgtctttgacctcctccacttgctgctttttgcttgtgcacgttccttcttttggccggggcgtcctactaccctcgtttcctatccagcgcta

SEQ ID NO: 5414 - DNA, 333 bp, Zea mays
atggcgccgccgccaccaccaccaccaccggcgaaaacggaacggcaaactggacatgtgtgtgcgcagctcatcctctcggtgaaccagactccaacagcagcttgctgtccaattgctcttcctcctgccattgccaccgagatgagaacggcggcggcggcggcggcggcgcaggctcgtggaactgcacgtgtgcctctggtgatgagggccttcagaaggaagagcatgctgagctacgtgacgggagctgtttcacttcctgcaactgcacgtcgggtactggaacttcagaggaagggagaaagcgtgtctcaagcaaaacagtca

SEQ ID NO: 5415 - DNA, 483 bp, Zea mays
atggcggacgcgaagcagcagcagcagcagcagcagcagccacagcaggcggcagcggcagccaccggcgtgtggaagacggtcaagcccttcgttaacggcggggcctctgggatgctcgcgacctgcgtcatccagcctatcgacatggtcaaggtgaggatccagttggccgagggctctgctggtcaggtctcaaggaacctgcttgcaaatgaggccgtccgttctttccacacccctttccaccgccggcttgcgcaccccaaccacacccccctcccaccctccagcccccccatatcagacctttttactctccctctcttttccgccgacccacctttccccccccaaacctgtttttacacctcccttcctccccgcacccacactcccaatcaccccttaacatatccccccccttcccgtcctcctcccgtcgctcctcggaccctgaacgtgccgtcctttgccccagcc

SEQ ID NO: 5416 - DNA, 522 bp, Zea mays
atgacagaagagagagagcatgctttatctgatctggaagtggttcccggccgggtcgccgcggccgttctggtcggcgtgttggcggaatccattattgccgccgccggcgtgcgcgtcggccgagctcttccggcgccgctcgttgtggccggccagacgcaggcggcagctgcgcttgacgtcgtcgaactccgacagctcgtggaaccggctgcattgctggcagaagcgctggcggaggccggcgacgagcacgacgggggccttggagtgcgcctcgcacaccttgtgcctccggttgtacggcttctcctcggtcatcaggttcgcgttgcaccgctccgcctggcacctcggcccgccgccgccgcctgccgcaacgacagacgccgccgccgccgccgccgcgcccctcctcaccgcggccggggaggaactggtagctccccctcccaagccggccgtcttagagaatcccccggggggcccaactttacacggaccaactttttttgtaaa

SEQ ID NO: 5417 - DNA, 774 bp, Zea mays
  misc_feature (401)..(401): n = any nucleotide
atggccgacaagaggtggttcatgggagtgttcggggtagccaaaagcttccgggccaccgatgtccaggtcggggggcggcgaccgggcacgccgatggccttgaccccgtccatgctccgggcgaggtcgaggtcggcgccgaggtacgcgtccgactccgcgaagaacgtgtcgacgccgctgtcctcgtggctgttgtcgggctcggggagcagccatcgacgccgcctcggcctcgctgctcccgtagtcttccgccaccgcttccccctgagctgggacctcggcccccgcggcggcagcgaaggccggggacgggaagggctgcggcgcgtccgcgagcgcgccgaagagaggggcgacggggaggcgctcgtggcggcgcgcgagcgggttgnccgagtggatgtcggcgtcgcaggcggcgcacagcgcggcggcgtcggcgcggcaggtgacggcggcgggggcatgctcgcagacctcgcacagccagacgcgcgcgtggcgcgacccggcgccgtgcgcccgggcgtcgcagccggggcacaggaacgcgccgtccgcgcggcagtgcagccgcgccggctccgcggcgcacgcgtcgcaagggcgcgcgcccaccacgctccagtaccccgccgccggcttctgctccaactccagccccagctccagctccgccgcggtgtccatgcctctgctccgggagtcacgagagagatgccacgggtgtcggtgtcaccagagacacgggcggactgggttgcg

SEQ ID NO: 5418 - DNA, 345 bp, Zea mays
atgggcaactgccaggcggcggaggcggcggcggtcatcatccagcaccccggcgggaaggtcgaccggctctactggtccaccaccgccgccgaggtcatgcggaacaacccgccacactacgttgccctcgacatactccgtgttcctgcagataataagtccgccgccgccgccgtcgccgccgccggccactttgagccgttacccatccccgttcctgtcgtcctatcgttttccttatccacatacccgtacactatttaccacatcattcttttcctgcccttcttctcctttcctcttacaactcgctcaaacctattatcttatatatcattaata

SEQ ID NO: 5419 - DNA, 669 bp, Zea mays
atgtccttcagcgatgacgaaccgatcatcccttctccaaactcagggccgaggccgacgccgatcgtgcccgggagggtgcagctggtgagcaagaacaacaacatggctccactggaggagaatacccagaaggtgctgcttgagctgaccggcggcgactccaccagcgaccggtcggggcttgacctggtggccgtgctggacgtgagcggcagcatgcagggcgagaagatcgagaagatgaagactgccatgaagttcgtggtgaagaagctcagctccatcgaccgcctctccatcgtcaccttcctggacaccgccaacaggatctgcccgctgcggcaggtgaccgaggactcccagccgcagctgctgaagctcatcgacgccctccagcccggcggcaacaccaacatcagcgacggcctccagacggggctcaaggtcctcgccgaccgcaagctcagctccggtcgcgtcgttggcgtcatgctcatgtccgacggccagcagaaccggggcgagccagccgccaacgtcaagatcggaaacgtgccggtgtaccccttcgggttcggcgcggactacgaccccacggtgcttgacgcggtgggcaggaaaaggcatggggagggaccttcttcgtcgccaacgacgggaacttgc

SEQ ID NO: 5420 - DNA, 621 bp, Zea mays
atgccccccagacacaggcatgcactcccaaagcccaaccacataaacggcctagctagaggctatcgcggcgaccgagcctttccggcagcgtacgtagcagcagcccaccgccctttaagggccatatgccgccgcgccggcagtggttcaaggaggtcgcgcgcgcggtccgctcgagtgtggttcttctctcaagacccctgcgcctggtcgatgcggtgctgtgctgcatccttgatgtcgcgggccttggacgccagcctcgccttggcgtggtccagctggtcggcgcccggcgggtgcttgcccgtcaggtacttgtacatccaggagaacacggacagcgcagcgacgccgaggccgccggaggtgacgaacccggccgccatgagcgccagcgcgatggcggccggcaccagcaccgggctgaagatcaccagcacgggggtggccaccgtgagcgcgatcacggtgccggccaggatcagcccggacagcaccagcatcgacccgccgaaggtggcggccgtcgcggccttgagcgccgtcatcatggcgccctgcttctgctgctgctgcgcctcgccgtgcatgccgcccccgcgctggaggtcgccg

SEQ ID NO: 5421 - DNA, 1215 bp, Zea mays
atggccgccgagatcatccgctacgggccctcggacgtcgcgttcgtgccctacggcgagtactggcggcagggcaggaaactcctcaccacgcacatgctcagcaccaagaaggtgcagtccttccgccatggccgacaggaagaggtgcggctcgtcatggacaagatccgcgcggctgccaccgccgcgccgccggcggcggtggacctgagcgatctcctgtccgggtacaccaacgacgtggtgtgccgcgcggtgctgggcgcgtcgcaccggaaccaaggccggaacaggctgttcagcgagctgacagagatcaacgtgtccctcctcggcgggttcaacctcgaggactacttccccccgaatatggccatggcggacgtgctcctccggctggtgtccgtcaaggcccggcggctcaaccagaggtggaacgacgtgttcgacgagctcatccaggaacacgtgcagagcaggccctccggcgagagcgaggagagcgaggcggacttcatacacgttctgctctccatacagcaagagtacggcctcactacggacaatctcaaggccatcttggtggacatgttcgaggcaggtatagagacatcttacctgacgctagagtacggcatggccgagctcatcaacaacaggcacgtcatggagaagctacagacggaggtgaggacgacgatgcgctcgccggacggcaagaagctggacatgctagcggaggaggacctcggcagcatgccctacctcaaggcgaccatcaaggagacgctgcgcctgcacccgccggcgccgttcctcctcccgcactactccaccgccgactccgagatcgacggctacttcgtcccagccgggacgcgcgtcctcgtcaacgcctgggcgctcgggagggaccgcacgacgtgggagaagccggaggagttcatgccggagcggttcgtgcaggaaccgggcgccgtggacgtccacatgaagggcaaggacctcaggttcatcccgttcggctccggccggaggatctgccccgggatgaacttcggattcgcgaccatggagatcatgctggccaatctcatgtaccattttgattgggaggttccgggctctgcagcaggggtgtccatggacgagtcctttgggctgacgcttcgccggaaggagaagcttctccttgttccaaggattgcttcc

SEQ ID NO: 5422 - DNA, 492 bp, Zea mays
atggcggcggctgatgtggagtaccgttgcttcgtcggcgggcttgcctgggccaccagcaacgagtcgctggagaatgccttctcctcctacggcgagatcctcgactccaaggtcatcaccgaccgggagacggggaggtcccgcggcttcggcttcgttaccttctcctccgagaactccatgctcgacgctatcgagaacatgaacggcaaggagctcgacggccgtaacatcaccgttaaccaggcccagtcccgtggcggcggcggcggcggcggcggctacggaggcggtcgcggtggcggtggtggttatggtggtgggcgtcgcgacggaggttatggtgtaggaggagactacggcggtaggaccaaacgcgatggagtagagatatctatagagcgtagtcaaccgcctattgccacaagtatctcaactaaatctactcgcctcctcttaatacttacatcatgctcccattcgtctcgc

SEQ ID NO: 5423 - DNA, 192 bp, Zea mays
atggctgacttggcaaggccagtggccgtgcccaccaggccggcctggcgaacctccttcgcagccgagcgggccaaggttggggcttccttcaccactggagggacgcggcggtctatctcctcaacggactcaccaaccttgcggtcgatgaacttgaggaggtcgagcgggacggcgtggaaacggtcg

SEQ ID NO: 5424 - DNA, 666 bp, Zea mays
  misc_feature (465)..(465): n = any nucleotide
  misc_feature (477)..(477): n = any nucleotide
atggcgcccaggaacgctctccccgccgccagcgccgtggccaacggcatggtgatggagccgaggttccgcggcgtccggaagcgcccgtggggcaggttcgcggcggagatccgggacccggccaggaaggcgcgcgtgtggctcggcaccttcgacaccgccgaggccgcggcgcgcgcctacgacgccgccgcgctccacttccgcgggcccaaggccaagaccaacttccccgtcgcgttcgccgcgcttccgccgccgccgccgcccaagaagccggccgccgtgaccgtgagccccagcagcagcagcaccgtggagtcctcctcctcctcctcccgggactcgcccgccacgccgcccaggcccgcgtctccgtcccagcaggccccgtcgctcgacctcagcctaggcggcacaccggccatggtggccgcccagccgttcctcttcctggaccgnaggctcgcggtnaccgtggccgtgccggcgcccgtgccctaccggccgaccgcggtcgccgccggtgccaacaagcatgctgcggcatcctgccgtgaagaggagcagagcgacaccgggtcgtcgtcatcccgtggtggacgcctccccagcggtcggcgtgggttcgacctcaacataccgccgccggccgaggtggcg

SEQ ID NO: 5425 - DNA, 249 bp, Zea mays
  misc_feature (223)..(223): n = any nucleotide
atgaaccgtggcgactggctcgcgctcgtcgccgtacactctgactcgtggctcgtctccgtcgcattctactacgccgcgcggctcaaccgcagtgatcggaagcgtttgttcggcatgatgaatgatctgccaactgtttttgaagtcgtctcccagtggtgtgaagcaatcaaagagagggatagatccggtactgacatggtggtagaaataaactgtncggtaagcaaacaagcgagccacgat

SEQ ID NO: 5426 - DNA, 246 bp, Zea mays
atgggcgccaacggccacccaccgctggcgagcacccgcgcgcacaacgggtcccactccggcggaagcggaggcggaggaggtgggggagggggagcgaaccctagcaacggcggcacggcggcggcgcttcggcacgaccctggcctggcgcgggagtggttgacggaggagcatgccatccttgacgaactgctggtcaagtatgcatccgacttacctgtcgttcgttatgcaaaattgcaa

SEQ ID NO: 5427 - DNA, 546 bp, Zea mays
atgtgcgacctagtggcccgcacgggccggcatcagcagcgatacgaggatggccgtcggctagtggctggatgcataccatttaggtatagagctaacaatgatgaaacctctggtgacaaaactaagaaactcgtggaagttctcatgataaattcccaaagcggacctggtcttttgtttccaaagggaggatgggagaatgatgaaactgttgaagaggcagcagctcgagaagctatagaagaagctggagttcgaggtgatatagtgcattttctggggctctatgacttcaaaagcaagacgcatcaagatgcgtgctgccctgagggtatgtgcagagctgcagtgtttgcgctgcatgtaaaggaagagctggcctcatggcctgagcagagcacccgacagaggacctggctcacggtccctgaagctgcatcaagttgccgataccagtggatgcaagaggccttgctgacaggcttctctgactggcacgacaagtggagcagaggcggcggcggcacaaactgtgacccggcc

SEQ ID NO: 5428 - DNA, 861 bp, Zea mays
atggaggctgcggcagcggcagcggcggcagctccagcgcctgcgggggagagggaccccgagcaccaccacggatgtctggccgtcaggacgtcgctgccgcggtgcgccatcggcgccggcggcggctcctcgctgcctggatcttccgatgaaacatcatgtggatcaccgagatggatagggagaggcctctcgtgtgtgtgcatcaagcggaaaggcacatatgaaaggatatgcatgaacctcacaccagtgcaggaagaaaggcttcagagattgaagcatcgcatgaaggtttactttgatccatctagacgagatcaccaggaagccctgaaagctctttggcatgcaacataccctgatcaagaacttgaaggtttgatatctgagcagtggaaggacatgggctggcaaggaagagacccatcaactgactttagaggcgcaggattcatatccctggagaatcttttgttctttgccaagacgttctccgcatcgtttcagagacttctaaataaacagtgcggtaacagagccacatgggagtacccatttgcggttgctggtgtaaatattacattcatgatcatgcagatgctagatctccagtctactaagccaagaacatttgtgcgagccatttttatccaaatgctctcagaggatgagtgggcatttgatctgctctactgtgtcgcatttgttgtgatggacaagcagtggctggacaagaatgcatcttacatggacttcaatgaggtgctgaagtcgacacgagcccagctggagagggagcttatgctggacgatgtcatccgcatcgaagacatgccgtcatacagcctgctttgc

SEQ ID NO: 5429 - DNA, 561 bp, Zea mays
atgtactcgaagtgcttggtggtgccgatgttgccgtcgtcgacgaggcggatgggcctgcggaggtgcggcctgctctcgatcttggtcagcgagatgccgcggaaggcgaaggcggagagcaccttgaagagcacggaggtgccctccctgtcgtgcgcgaacacgatgctggtcttgaaggggcggtccgtgcgcggcacgatgggctcccgggccagcgtcacgaagcgggtcacgttgccggagtcgtcatggatgccgtccggcagcacctccattccgtacagctcggcggcgcgggaggaggcgatggcggccgtgtcgcggaggccgttggcggccacgtgctcggcggcgccggccgtgtcgtcgaaggcctcgcggaccacgttcaggcccatgcctgtcagcgtgtgctcgcactgcgccagcgcctgcgggtggctgatcacgcgggtcaggcactccttgcgcaccccgggcagcgccagcaggcagtggtgcacggggagctgcacctccccgacgatgtggagccggtgccggagcagcaggtcg

SEQ ID NO: 5430 - DNA, 546 bp, Zea mays
atgaaacccaagatatcagattttggaatggcaaggatgtttggaggggaccaaaaccaattcaacacgaatcgggtcgtcggtacatttggctacatgtctcctgaatacgcaatggaaggcattttttcagtcaagtctgacgtctatggcttcggagtcctgatcttggagatcatcacaggaaagagggctgtgagcttccactgtcacgaggactccttgaacatcgctggatatgcgtggcggcaatggaacgaagacaatgctgcggagctgatcgatccagtgataagagcatcgtgctcagttcggcaggtgctgagatgcatccatattgcgttgctgtgcgtgcaagatcacgcagatgagcgacctgacatccccactgtcatccttatgctgagcaacgacagctcgagccttcctaatccgaggccgcctacgctgatgcttcgaggccgtgagatcgaatccagcaagtcaagcgagaaggaccggagccactccattggcactgtgacaatgacacagttgcatggaaga

SEQ ID NO: 5431 - DNA, 195 bp, Zea mays
atgcggaggttcaagggaacaactttggcgacacgccgcggcggcctcagtcggtggccgcggccacgtcgaggacgagagtcgcggcgggtgccggggcctccgcctcctccacgtccaccgtggcgccggaggcgacgagcgtccagtccggcgggagcggcggcagcggcgggtactgcgtggggcggcgct

SEQ ID NO: 5432 - DNA, 570 bp, Zea mays
atggtgcagcaagccgcgaaggaggtgatcccgctgctgacgccttacaagatggggcagttcgagctctctcaccgggtggtgctggcgccgctgacgaggtgccgctcctacggcaacgtgccgcagccacacgccgccgtgtactactcccagcgcgccaccaggggtggcctgctcatcgcggaggccacgggggtgtcggccaccgcgcaggggtacccggagactcctggcatctggacgcaggagcaggtcgaggcgtggaagcccatcgtcgacgccgtccgccgcaagggcgccatcttcgtctgccagatctggcatgtgggcagggtctccaccaacgagctccagccgaacggcgatgcgcctatctcgagcacggacaagcagatctccccggacgccgagtccggaacggcgtactcgaagccgcgccggctgcggacccacgaggtctccggggatcgtcgacgacttcaggcgggccgcacggaacgcgatccaggctggcttcgacgcgttcgagatccacggcgcgcacgggtacctcctgggagcagttca

SEQ ID NO: 5433 - DNA, 204 bp, Zea mays
atgtccatgttggggagcaggcgcgcctctaggatccagaggtcgaggtcgccatgcaggaggacgggcttcgctggagactcgccgccggccggcgacgccatcgccggcgacggagcctcgcggtcggggccggtgccggccgccggggcacgggagaggcggcggcgagcgtctatgcaaccaaccagagcactccaatcc

SEQ ID NO: 5434 - DNA, 510 bp, Zea mays
atggacacgcacgtcggcaaattaatcgactcggtgggctccatcttccgcggcagcgacgtcctgccctggtgcgatcccgacatcatcgccggtttcgagagtgaggttgctgaggctgcaaatgaagaacagaaaaccgagagcctgatgaggctctcctgggcgcttgttcactctagacagcctgaagatgtcaaccggggcatcggaatgcttgaagcttcattggacaggtctagcagcccagaggaaacaagggagaagctctacttgttagctgttggtcgttacagaactggggattatacaagaagccgacagcttttggaaagatgcttagagatccaacatgactggagacaagccataactttgcaaaggctcgttgaagaaaaaaccaaaagagatggtatgattggcatggctatcatcacaggcgcctttggagttgtgggtcttgttgctggtggtataattgctgcggcttcttcgtcatccaggaagaga

SEQ ID NO: 5435 - DNA, 435 bp, Zea mays
atgggcagcaacactggtggtgccagtggtggcttctaccagcccttcaacagcaacttagctggtgcaggggctagcactggcatccaaaactttccaggtgtacggctgcgaggtctcccttttgattgcaatgacattgatatctgcaagttctttgtgggactggacatagtggactgcctcctggttaacaagaatggtcgcttcactggtgaggcttttgtggtcttcccaacagctatgcaaacagaatctggtctgcatcataacaggcagaacatgggccggaggtatgttgaggtgttcagatgtaagaagttggagtactaccgtgcaatagccaacgaggtgagccagggtggttactttgagtcggagtatcgccgctcctcacctcctctgaggccaaaacgcgtgggtcgacgactctcg

SEQ ID NO: 5436 - DNA, 105 bp, Zea mays
atgtgcgagtccacgtccagcatgtactccaccacctcccgccgcagcggcggctcagcgcgccccagccgcgccgccaccatctgcatcgcctggaaccggagg

SEQ ID NO: 5437 - DNA, 504 bp, Zea mays
atgggctcggaggcggactgcgacaggatcaggggcccgtggagccccgaggaggacgacgcgctgcggcggctcgtggagcggcacggcgcgcgcaactggacggcgatcgggcgcgagatcccggggcggtcgggcaagtcgtgccgcctgcggtggtgcaaccagctgtcgccgcaggtggagcgccggcccttcacggcggaggaggacgcggccatcgtccgcgcccacgcccgcctcggcaaccgctgggccgccatcgcgcgcctcctccccggccgcaccgacaacgccgtcaagaaccactggaactgctcgctcaagcgcaagctcgccgccgcgtccgccccggcgggttcctccgacgtcgaggcgcgcccgaccaagcgcgtcagcctctcgcccgacagcccgtcggggtcggggtcggggtcagggtcagggtccgggtccgggtccgggtccgaccgtagggacttgacccacggcccccgcccaggt

SEQ ID NO: 5438 - DNA, 411 bp, Zea mays
atggcggattcgaaggccgctgcggcggtgacgctccgcacacgcaagttcatgaccaaccgtcttctctcccgcaagcagttcgtgctcgaggtcatccaccccggccgccccaacgtctccaaggcggagctcaaggagaggctagcgaagatctacgaggtgaaggacccaaactgcatcttcgtgttcaagttccgaaccaacttcggaggcggcaagtccaccggcttcggtctcatctacgacaaccttgaggccgccaagaagttcgagcccaagtaccgcctcatcaggaacggccttgctaccaaggtagagaagtcacgaaagcagatgaaggaacgtaagaacagggcgaagaaaatccgtggtgtgaagaagacaaaggctggagatgccaagaagaag

SEQ ID NO: 5439 - DNA, 783 bp, Zea mays
atgagtcgaacgcagtgggagtccttcatttgcatgctcatgacaggggtggatgatccagagacggtttatgaggttaatggcaaccagatctcaaagacaatccagtttttaggagtgagatttgagtccttcaacctcagtgtggagttcttccggtccgttttccttgtgcagcagatccctgcgcttcgccatgggcgcagaagggtccgtgccatcctgaagcttgataagttggatggtttaagtcaggaatgggtgaactcagatgttcttattttcaactcagggcattggtggactgccagcaaattatttgacatgggttgctattttgaggctggaggtgtgcttaaactgggaacatccattaatgctgctttcaaaatggcattggaaacttgggcttcatgggtgaaagagagaattgatttaaggcgaacacatgtattcttccgtacatatgaaccgtctcattggagtggcttaaatcaaaaggtgtgtgaagtaacacaacaacctaccgctgaggccaatggaaatgacaggagagaatttggggatatacttgctggtgttgtggcaaatatgagtgtccctgtgacagtactaaatgtgactttgatgggggcctttagaagtgatgctcatattggactttggagtcatcctaataccatactagattgcagccactggtgccttccaggagttcctgatgcttggaatgagcttgtattttcgcaccttttgactaatggttggcgagtgccggctagc

SEQ ID NO: 5440 - DNA, 294 bp, Zea mays
atggcgtccgccacatcggcgccgcccgccacctccatgacgtggctgcgcagcgcgttggggctgtcgcgcgtgacgaagatgggcggcttgggcttgttcttggaccccggcgggcgcccgcggggccgccggctgggcgccgccaccacggcgccaccggactcgttggtctcatcggctccgtggtcgcccggcgcgccgactgccgggctgctgggctccgggtccttcatggccgggggctccgtcttggggttggggccgccggacggctgctccggcaggcccaag

SEQ ID NO: 5441 - DNA, 510 bp, Zea mays
atggcctcggttccggctccggcgacgacgaccgccgccgtcatcctatgcctatgcgtcgtcctctcctgtgccgcggctgacgacccgaacctccccgactacgtcatccagggccgcgtgtactgcgacacctgccgcgccgggttcgtgaccaacgtcaccgagtacatcgcgggcgccaaggtgaggctggagtgcaagcacttcggcaccggcaagctcgagcgcgccatcgacggggtcaccgacgcgaccggcacctacacgatcgagctcaaggacagccacgaggaggacatctgccaggtggtgctggtggccagcccgcgcaaggactgcgacgaggtccaggcgctcagggaccgcgccggcgtcctgctcaccaggaacgttggcatctccgacagcctgcgccccgccaacccgctaggctacttcaaggacgtgccgctccccgtctgcgccgcgctgctcaagcagctggactcggacgacgacgacgaccag

SEQ ID NO: 5442 - DNA, 333 bp, Zea mays
atggcgccgccgcagccaaagtcgggccttttcgttggcatcaacaagggtcatgtcgtcaccaagcgcgagctgcctccccgcccgtgccaccgcaaggggaaatcaacgaagagggtgtctatggtcaggggcctgatcagagaggttgctgggtttgctccttatgagaagcgtatcactgagcttctgaaggttggcaaggacaagcgtgccctgaagcttgctaagagaaagcttggaactcacaagagggcaaagaagaagagagaggagatggcgggcgtcctcaggaagatgaggtcggctggtacgcacactgacaaaaagaaa

SEQ ID NO: 5443 - DNA, 762 bp, Zea mays
atggcggccccggcgcctcacgtcgcggtgagcgccgccgccgtcctcctcctcctcccgttcctcctcgcgcccctcgccgtcgcgcagccgcccaagagcgccaaggcgttctgcattagccagttcgccatcgctagccaggcctgttctatcctgccgccgagtccacccgacgagcaccaccaccacgacgatgaggacgacgacgacgacgacgagcatgatgaccgcagcgaccgccgcagccaccacgcggcggccatcagcatctcgggcctgctggcgagcaataacggcagccacggcgtcgtctctgggaaccgcaccgttggtcaccacccacaccaaggcaaccgcacccgcggcgggcacgggcgcgggcgcgggcgaggccgtgggcgtggccgacgtgggcgtctgcgggatgacgacgacaaccatgacgccgacgatcctgaccacgacgatgaccatgacgacgatgatgaccacgacgaccaccatgacaccgacgacccagatcacgacgacgaccacgacaatgatgacgacgacgacgacgacgatgaccacgatcacgaacaccacgacgaggagctccgcgcgtaccgcgactgctgccgatggctcaaagaggtgcagaaggaatgcgtctgcgaggcgctgctgcggctgccccccttcctcgtcaagccgcagcacacttacgttgtcagggtcggcaggacgtgcaatatcacctaccgctgcggcggcgtc

SEQ ID NO: 5444 - DNA, 141 bp, Zea mays
atgcattcttcaaagcaattgttgctttttcccatatgtcatcagtgccaacagatttttctggtctggttgaaaggtttatctcataataccgaaaaccaaattgtccaagtatttgctcagttagatcaagaacacctc

SEQ ID NO: 5445 - DNA, 447 bp, Zea mays
atgcagcagcgcaactacgggagggaaggattctcgcatataactgtcacaggtgctcttgctcacgggacgaaggaggtggaagtgtggctacaaacatttggtccaggtcaaaggaccccaatccacaggcattcttgtgaagaggttttcattgtcctcaaggggaaaggcacgctcttactcgggtcgagctcgctgaagtacccaggacagccgcaggaagttcctgtctttcagaataccacattttcgatccctgtaaatgatccacatcaggtctggaattctaatgagcacgaagatttgcaagttcttgtgatcatatcgcgcccaccggtcaagatatttatatacgatgattggagtatgcctcatacagctgcaaagctgaaattcccctacttctgggatgaggactgcttgccagcaccaaaagatgaactc

SEQ ID NO: 5446 - DNA, 657 bp, Zea mays
atgggggagaagacggagtaccgggacggcccgctggagcgcgcgttcatggggctgttcgcgcgcaagatggagaagtacgcggcgaagaagccggcggcgcaggcgaaggaggagagggcggtgtgggagtgggactacgagagcttcgtggacgtgtcgcggcgggtgatgctggggcgcacgcgcgcgcagcagcagcaggcggtgcgcgaggtgctgctgtccatgctgccccccggcgcgccggcgcagttccggcggctgttcccgccgacgcggtgggcctgcgagttcaacgcggcgctgaccgtgcccttcttccgctggctcgtcggcccctcggaggtggtggaggtggaggtcggcggcgtccggcagcgcagcggggtgcgcatcgagaagtgccggtacctggagagcagcggctgcgtggggatgtgcgtcaacatgtgcaaggtccccacgcaggacttcttcaccaacgagttcgggctccccctcaccatgaacccaaatttcgaagacatgagctgcgagatgatatacggccaggtgccgcctccgttggaagaggacccggcgtcgaagcaagcttgctacccgagcctctgttccatgtcgacgccatctgccccggcctgtccgaagcttcag

SEQ ID NO: 5447 - DNA, 978 bp, Zea mays
atggccgacaacgcgaaggccgcggcggcgcatgcgaggccggagtcgtcgcaggaggaggaggaggactggaaggaggccgagggggacgtcgccgaagtcgaccgcgccgccaccaatggcgccggcgaggggggcgtgcccacagacaggccgatccgggtctacgccgacggcatctacgacctcttccacttcggccatgccaagtcgctggagcaggccaagaagtcgtttccaaacacatatcttcttgttggatgctgcaatgatgagttgacacataaattcaaaggaagaactgttatgactgaggatgagcgatatgagtcacttcgtcattgcaagtgggttgatgaagtcattccagatgctccatgggtggtgacagaagagttcttggataagcataacattgattttgttgctcatgattctctgccgtatgctgatgctagtggagctggtaacgatgtttatgaacatgtaaaaaagcttggtaagtttaaggagactcagcgcactgatgggatatcaacatcggacattataatgcggattgttaaagattataatgagtatgttatgcggaatctggccaggggctacactagaaaggatcttggtgttagttatgtcaaggaaaaacgactgcgagtgaacatgggacttaaaaacctgcgtgacagagtgaaacagcaccaagaaaaagtaggggagaagtggagcacggttgcaaaactccaggaagagtgggtggaaaatgcagaccgctgggtggctggtttcttagagaagtttgaggaagggtgccactcaatggggacagccatcaaggagaggatccaggagaggctcatcaaggcacaatccagcgactttggcagcctcctacagtacgacagctacgattctgatgaagccaaagaaaacgacgaggacgaagacgaagatgaactctttgaagacgtcaaggaa

SEQ ID NO: 5448 - DNA, 1239 bp, Zea mays
atggccgccgccgccaccacctcctcatcctcccacttgctcctcctctcccgccagcaggcggcctccctacgatgccgcctctccttcctcggccagcccgccagaaggtccggcagggtcacggcccaggcgccggccgctaaggacgtgcggtgcatggcggccgtggacactgcggcgtccgcggcggcggcggagacgagccccaagtcgagcagctacgagatcgtgacgctcacgacgtggctgctgcagcaggagcggaccggcgcgatcgacaacgagatgaccatcgtgctggccagcatatccacggcgtgcaagcagatcgccgcgctggtgcagcgcgcgcccatctccaacctcacgggcgttcagggcgccgtcaacgtgcagggcgaggaccagaagaagctcgatgtcgtctccaacgaggtgttctccaactgcctcaagtcgagcgggcgcaccggcgtgatcgcctcggaggaggaggacgtgcccgtagcggtggagcagagctactccggcaactacatcgtcgtgttcgaccctctcgacggctcctccaacatcgacgccgccgtctccactggctccatcttcggcatctacaaccccaacgacgagtgcctcgccgacgtcgacgacaacgacacccttgattcggtggagcagaggtgcatcgtgaacgtgtgccagccggggagcaacctgctggccgccggctactgcatgtactcgagctcggtgatcttcgtgctcaccgtcggcaccggggtgtacgtgttcacgctggaccccatgtacggcgagttcgtgctgacgcaggagaaggtgcagatccccaaggcgggcaagatctacgccttcaacgagggcaactacgcgctctgggacgacaagctgaagctgtacatggacagcctcaaggagcccggcgactcggggaagccctactccgcgcggtacatcggcagcctcgtcggcgacttccaccgcactctgctctacggagggatctacgggtaccccagggacaagaagagcaagaacggcaagctgcggcttctctacgagtgcgcccccatgagcttcatcgtcgagcaggccggtggcaagggctctgacggccaccagagaattcttgacatcacacctacagagatccaccaaagagtgcctctgtacattgggagcgtggaggaagtggacaaggtggagaaattcctggct

SEQ ID NO: 5449 - DNA, 285 bp, Zea mays
atgtcactgttaccactttcctcaaagatctgcatcagccaagttttgatggatttacttttgtctataactgtttcacttccaacctccaagcgaccgattaacttgggatcaatcttgtattttttcagcagagaattgacaaccgtcaaactcattgagatgacatcctccacctcgctgcaaaaggccatgcaatcttgcccaagcccaatggtgtacttccctttgctcgccccatcatgggcctcaagtgcctcctgctgcacgcaggagggcgggaag

SEQ ID NO: 5450 - DNA, 423 bp, Zea mays
atggcggagcggacggcgcagtggtggaggatgttggagttcacgaacgagacgccggtcgtggcgccgacgtcggccgcgaaccccgcgacgcgggcgttgttgagccggatcacgaggtcgtgcgcgtcgatctgcgcgccccggccggagccgagaagggtgccgctgttcccgacgacggcgcaggtcggggcgcgccggcgccggcgctggccgaggaggagggcggggaggtcggccatggcgcccgcgacgtcgtcgccgcctcggcggtggcggtggcggtggcgcgcgaggaggaagccgcggagggatgcgcggaaggcggcgaggagggcgtcgtcgttggggacgtcgtggaagggaatgcggagacgggacactgtccgctgccgcggcgcggaggtggcgttgatgcgg

SEQ ID NO: 5451 - DNA, 390 bp, Zea mays
atggttatttcgataccgcaggggttccaaaaaataaactattctagcgtttcaacgtttggatttgaagctatctgtgaccctcctcagtctttccaccaagacaggaatgtcctcctcactcaatgttgtgaagcaacacctgaaccatccaggctcaatgcaatggcaagaagaacctggggtaacgttgacctttgcttcctccaacagcctatcccagagcttgcgctctcctttctcgctgtaagatcggatgtacctgctcatgtctgcccagcaatagaacccgccgctgctcttgaagcattctatcccaagttgtttcaaagcatcagaaaacagaaggtacattttccggagcctctctctggtaacctttatgtattc

SEQ ID NO: 5452 - DNA, 267 bp, Zea mays
atgtcgagccggaggccgtcgtcgcgtggcaacatctccgaggacgagatcaacgagctcatctccaagctgcaggccctgctccccagctcccgccgccgcggctccggccaggcgtcgacgacgaagctgctcaaggagacctgcagctacatcaagagcctgcaccgggaggtggacgacctgagcgaccggctgtccgacctcatggccaccatggaccacaacagccccggcgcggagatcatccgcagcatcctccgctcc

SEQ ID NO: 5453 - DNA, 504 bp, Zea mays
atggacgaggacttcgagatgcctcccgccggcgccgatgagatgatgggcgacgacgagatgggcgacttcggcggcgacgagggcccggtgatgaaggtgggcgaggagaaggaggtcggcaaggaggggctcaagaagaagctgctcaaggagggcgagggctgggagactcccgaggtcggcgacgaggttgaagtgcattacacgggcacgctccttgatgggacaaaattcgactcaagccgtgatcgtggagaacccttcaagttcaagcttggacaaggtcaagtgataaagggttgggatcaaggaatcaagaccatgaagaaaggagaaaacgctattttttaccattcctccagagctggcttatggagcatctggttcaccttcaactatccccacccaaggcaaccctgcagtttcgaatgcgagctgctttcatgggacccacggcaaagaaattttgcaaagagggcggcattattcaagaagaacctt

SEQ ID NO: 5454 - DNA, 969 bp, Zea mays
atgtcgtcgttcggacgcaattcatggtgtatcctcgtgctggcctccgtgctcctcctgtcctgcctcgccgacacggccgtggccaagcgaacaggcgagctcaccgtcttctggggccggaacaaggaggagggcacactgcgtgaggcctgcgacaccgggctctacaacaccgtcatcatctccttctacagcgtgttcggccacggccgctacgccctcgacctctccggccacccgctggacggcgtcggcgccgacatcaagcactgccagtccctgggcatcccggtcttcctctccatcggcggcgggggaaaccactactccatcccttcctccgcgtccgcggaggccgtcgcggacaacctgtggaacgcgttcctcggcggcggcaacagcgacgtgccccgccccttcggtgacgcggcggtcaacggcatcgacttctacatcgacgaccacagcgcaccgggcgaccactacgacgagctcgcgcgccgtctcgactacttcaacagcatgtactaccacgccacgacgaagtacgtacggctgacggcgacgccgcggtgcgcgttcccgcccgacgaccccatggcgcgggcgctgcggacggggctgttcgagcgcatccacgtccgcttctacggcgacgccgacaagtgctcgtacaagaacggcgacgtgtccggcgtcgtggaccagtggagcaagtggacggcgaggtaccccaagagccagctttacgtggggctcgccgcggccgagagcggcgtgccggaccacgcgccgccccccgttgaggtctacctcaaatacctctactacgatctgctgcccaaggtgcagaaggcgcccaactatggtggcgtcatggtctggaataggttcaccgacaacaggaccggatacagcggcgccgtcaagggctgggcggcttgcagctatgctggctgtgttaac

SEQ ID NO: 5455 - DNA, 969 bp, Zea mays
atggtgcagcaaacgctggggatgtcgctgccgatggcggcgttcgtgcccgagcagggcagcgccaataggctgaccaggccgccggggctgccgccgctgccgcaggcgttcgcggcccagcagcgcggggacgtgtgcatggaggccgtcgaccccgcggctggcccgcgcaaggcgcaccggcgctcccgcagcgacgtcccgttcggctacttcccgccggcgggccaccaccagctcccgccgcccaaggtggaggccggctggggcggccacctccccgccggcggcggcggcggcggcgacgacgacctgttcaacgcgtacctcaacctggaggggctggacgggctcaactcctccgacgaccgcctcgacgacggggacagccgcggcagcagcatgaggaccaacggcgccgacagcagcgagaacgagtcggaggagtgcgccgccgacagccgcgccgggatccgcctctgcgccgccgctgccgacaggcgggaggggctcaagagggccgccgctgcgcccgtggcgcgccacgccaggagcctgtccatggatagcctcatcggcaagctcaacttctccgccggcgcgacgggcgccgctagcggcgtcattccgggacccaacaggttcagcctcgagttcggcaccggcgagttttcgccggtcgagatgaagaagatcatggccgacgagaagctggcccgagatggcgctcgccgaccccaagcgcgtcaagagggtgctggccaacaggcagtcggcggcgcggtccaaggagcgcaagatgcgatacattggcgagctggagcacaaggtgcagatcctgcagacggaggccaccactctctccgcccagctcacgcttcttcagcgggactccgcggggatcgcgacgcagaacaacgagctcaagttccggctgcaggccatggagcagcaggcgcagctgcg

SEQ ID NO: 5456 - DNA, 657 bp, Zea mays
atgcgcctggaccgatactggtgtgcacgcgcaacgacgacctcgacgccgtgctcgaggccacccccaagtcgcgctggcgcgaatggaatgctggatccatggtttaagatcaagggcctagtgggtgcaaaccaggtgttggcctacttcgctgtatcaaaggttggagagccaccagtcgatgggattactgataccaacccagaggggttgactgctgcatttggcagctgggctcctgcagtggctgcccgcctgcaaaatggtggacttacctgcaaggtgcttgaaaaggaagcctttcagaagcagatgctagagaagttgatatggatttcagctttcatgcttgttggtgctcggcatccaggggctactgttggtgtggtggaaaagaattaccgatctgaggttgcgagcctgatagctgaattagcatcggctgcggctgcagaggagcagctcacattcgccgaaggcatggaggatcggctctgtgcttactccagggctgtggcacacttccctacagctgtgaaagagttcaagtggaggaatggctggttttactccctcaccgagaaggcgcttgcagcaggaaagccagatccttgcccactacacacagcttggctcaaggagattagggtcata

SEQ ID NO: 5457 - DNA, 612 bp, Zea mays
atggccaagatcaagatcgggatcaatgggtttggcaggatcggaaggctggtggccagggtggccctgcagagcgacgacgtcgagctcgtcgccgtgaacgaccccttcatcagcaccgattacatgacctacatgttcaagtatgacactgtgcacggacagtggaagcaccatgaggtcaaggtgaaggactccaagacccttctctttggtgagaaggaggttgctgtgtttggctgcaggaaccctgaggagatcccatggggttcggttggcgctgaatatgttgttgagtctactggtgttttcactgaccaggagaaggctgcagctcacttgaagggtggtgccaagaaggttgtcatttctgctcctagcaaggatgcccccatgttcgttgttggtgtcaacgagaaggagtacaagtctgacatcaacattgtctctaatgctagctgcacaaccaactgccttgctccgcttgctaaggtcatcaatgacaagttcggtattgttgagggtctgatgaccactgttcatgccatcactgctacccagaagactgttgatgggccctcatctaaggactgcgaggggtggaagggctgc

SEQ ID NO: 5458 - DNA, 498 bp, Zea mays
atgcgaagcatggggttaaaagacagagacaaagttgtaacgccttcggatcgtcacttattttttcgcttctttccgggcttcagcttgataacctcgtcaatgtacaggatccccttccccttgtacacctctggagccttagagctccggatggcgccggcgaactggtgcaccctgtccttatcgatgccggtgcagcagattatgttgggtttgaagcagaagacacggacagctggaggagcggtgaactgcacctcatggctgaagcccagtttaaggaacaactcacggccttggctctctgacctcgctttgaagccgaccccaacgagcttcaggaaacggaaaaacttggcttccattgagattaaatggcgagctcttcaaacagcctgcaggccggctgctggcgccgccgcgccggggatggaggaggggacgatgccgccgtatcccccgtcaccggtagcgcgccgccgtcacctgttccgc

SEQ ID NO: 5459 - DNA, 1431 bp, Zea mays
atggcggagccgggcaaaagagcggtggcgcagtggcggcggtgggcgctggccaacctgggcccgttcgcggccctgttcaccaccaacttcggctcggcgtggctgatcctggcgccggtggtgtcgctggtggccacctacgcgccgcggcggctgttccggacctacttcaacctgttcctccgccggcgctcccgccgcctgctcaacgtcgtggacccctacgtgaccatcgacatctcggagcccggcggcgaggtgcgctactcgcgctacggccccgtctccgacaacgacagcacctacgaggaggtgaaggcgtacctgagcggcgccgcgcgcgagcaggacgcgcgcgagctccgcgccgagggcgcccgggagggcaacggcctcgtcgtcagcatgcgcgacggccaggacgtggccgacgagttccgcggcgtcccgctctggtggtcctccgtggtcgccagggacgtgcagggccagcgcaagggcgaccggcgcttccagcggctcaccttccacctgagccaccgcgcgctcgtcgtcgacgagtacctgccccacgtccgccgccagggccgcgagatcctcttcagcaaccgccgccggaggctctacaccaacagcaagtcacgcgactcctacagctacgagtacaagtcgtggagctacatcgacttcgaccacccgaagacgtttgacacgctggccatggaccgggtcagaaaaggacatcatccacgacctcgacacgttccggaacagcagggagttctaccggcgcgccggcaagccgtggaagcgcgggtacctgctgtacggcccgccgggcacgggcaagtccaccatggtcgccgccatggccaactacctcgactacgacatctacgacgtggagctcaccgtggtgcacaccaacagcgacctccgcaagctcctcatcgacaccaccagcaagtccatcatcgtcatcgaggacatcgactgcacgctcgacgtcaccggcgaccgcgccggcaggccgcggcgccgggccaacggcggcggcgacgccgacgacaggccgcgcgactcggtgaccctgtccggcctgctcaacttcatcgacgggctctggtcggcgtgcacgggcgagcggatcgtcgtcttcaccaccaaccacgtcgagaggctggacccggcgctgatccggcgcggcaggatggacatgcacatcgagatgtcctactgcaggttcgaggcgttccagacgctcgccaagaactacctggacatcgacgaccacgacgacctgttcgccgccgtcggggaggtactacgggaggagaacctcacgccggccgacgtcgccgagtgcctcatggcggccaggcgcgctggctccggcgagccttccccgtgcctccagatactgatcga

SEQ ID NO: 5460 - DNA, 402 bp, Zea mays
atgttcagagaggctcgaacagagatgattgagagtctcctaaggatatatagctgttgctcaaactcagcctctgatcttgagctcttggtaacgaaaacctgctcaatgactggctcagtctcgagtgcagattcacccaagtctgagttgtcagtcggaaccagacgccacccgagtattacatgtcccagtgattctgcaaccttcataaactcagctttgcctttctcacgacgcttttcatctgttggcataaaaaacattccaacagcatactcgcctggtgggggtagctcaaacccagcatcctttgcgacctctttgaagaagtcatgtggtagagcgaccatgatgccggcaccatctcctgtattcttctcgcagccgcaggcaccacgg

SEQ ID NO: 5461 - DNA, 168 bp, Zea mays
atgaggagcgcttgttcttgcgggagccgccgcccacggggacgttgcggagggatccgccctccgtccagtagcggcggcacgtcttgcagaagtagcgtggctgctggaggctgtagttgttgtagtagcagaatttggtgttggtggagttgcaccgcgggcagt

SEQ ID NO: 5462 - DNA, 567 bp, Zea mays
atggacctcgccaagttctccccacctcagatcaagcgcatcctcagtgccgcgtcgctggagcgcgaggtgttcgacgcgctaatgctcgtgaagaagtttgggccggatgtgcgggaaggaaggaggagacagttcaattacatcggaagtcttttgcgcgatgcacaaccagaattgatggatactctaatacaagcttctaaggatggagatgagaggaagttatataccttacttagtgaaggtaaactgttggtggaagaagaggaagaggaggaagaggacctacctgatggagaagaggagaatcaagagtatatgaaaattgcagatagatggtttgacggcctcctctgcaaagacatttcagttactaatgaagtttactctgtccatagtgttgaatttgatcgtcaggagctgcggaagcttgtgaagagagcccacatgttccaagaaagcacacaaaataaagatggggaagaatctaatgcgaagctttctggagcaaagaaaccacttatgaggttccttcgttcccttgcaaaggaggcttatgctcca

SEQ ID NO: 5463 - DNA, 558 bp, Zea mays
atgaagaggaccacgagcaggagcggcgcgtcgcccgccgccggcctgtggctccggccgggccggctcggtgaggttctcgccgtcgcgactctgctggcctcggcgttgctgccgtccggcggcggctgcgaccgacgctccgccgcccggcgtcgtcgccgcggcacgactacgaggacgcgctgcgcaagagcctgctctacttcgaggcgcagcggtcggggcggctgccgcacggccagcgcgtcacctggcgcgaccactcgggcctcaccgacggcctcgagcaaggggtggacctggtgggcgggtactacgacgccggcgaccacgtcaagttcggcttgcccatggccttcaccgtcaccatgctctcctggagcctgctggagtacggcgccgacgtcgccgacgccggcgagctcgcccacgcgctcgagtccatcaagtggggcaccgactacttcatcaaggcgcacaccaggcccgacgagctctgggcagaggtcggcgacggcgacacggaccactactgctggcagcggccggaggaca

SEQ ID NO: 5464 - DNA, 702 bp, Zea mays
atgtcggagcgcgaggcgttggagcggcgcacggtgacgtgtatcctgccgtcctccttgacctcggcctccgtctcgatggcgtccctgcggccgtcgagggagaccacgtccgggtcgacgacgatggaggcgatggccccggcgttgtccgggaactgctcggtgatgagcatccgcgcgccgcggtactcgaacatgaagagcatgagcgtgtaccagatgatgcactggagcacgacgatctgcaccatgaggctgccggagaagtcgccgtacatgcccttgagcagggggatgcccatgacgagcgtgttgggcagcgtggagagggagaagagcgtgatggtccactccagggctgccccggcggctgaggtggctccacgcggtgagcatggccagcaccatgagcttctgcagcgtgtcggcggcgatgaagcgcaggttcatggtgtaggggttgttggtggagatgaagtggaaggacagcagcggcaccgcgaagagcgccacgaagcggttgatcccggagcactggtccggcgagaagatgcgccaccaccgcaccgacccgtaggccaggatcatcgccacgtacagcggcaccacggccgtcatgacgtggtagaagtccgtccccgtaatcatcttggagcgctctcacgacgctggctccctcactcacccagcagcccccgg

SEQ ID NO: 5465 - DNA, 573 bp, Zea mays
atggaaaattttggggggtcagtagcatcatatgatcagcaatatttgaagaacacaactcctgctgaatcctcatatagactatggtggtaccaagtttgcagtgaggttgcatatttccaggtggcaccaaaaaacgatagtgttcgttccccaaagatcgacacgaggtaccatttggacttgtgcagaaatgttttcggcgaaggagtctaccctgatgtctttatgacaaacttatactatggaggcacaggaattgcaggttctaaaattgtttttgcaaatggatctcaagacccatggcgccacgcttctaagcagaaatcatcagacgaattgccatcatacctaattgagtgcaagaactgcggacactgcagtgatctctctggatgccctcaagctccttcaaacattgaaggtgattcatccaagtgctcacctcccgaagctctgaacaaagtaaggaaggagattgtcgatcacattgacctgtggctatcagaatgccaagagcaaggacatgacaaggagccatggctgggaagcagatggagcatagctgctatt

SEQ ID NO: 5466 - DNA, 171 bp, Zea mays
atgccacgccggggcccgcgggacgcgggccgcagccggtgcactggctctggcacccggcgccgcagtactcggaggtgtcgccgcaaaagccgaagcggctgcagcagaggcagtcgcggcacgttgcgccgccggcctgctgcccgcactgctggccgctcgcgaccg

SEQ ID NO: 5467 - DNA, 660 bp, Zea mays
  misc_feature (625)..(625): n = any nucleotide
atggcggaaccggccctcctcccgccggaccccttcgcggacctccccttccccgaatttcaggcgcccatcgacggcgacagcttcgcgcttgaggacttcgatctggaggatctggacctggacgtggacttcgacctcgacctcttcggctcggacgggcaaccctcgcaaccgcccccgctcgcgacctcgtcctcctcggccgggtctccggttggaggctcgtcctcttccggtgccgtcggggacggcggagggctgaggaatgaggagtcttcggagtcgtcttcgaggagcgcgagcggcacggatggcagcggcaaggggaagggggaggaggacgaagcgaagcggcgcgcgcggcaggtacgcaaccgcgagagcgcgcacctgtcgcggcagaggaagaagcagtacgtggaggagttagagggtaaggtgaaggccatgcaggccaccatcgccgacctctccgccaggatctcctgcgtcaccgccgagaacgccgctctcaaacagcagctgggtggcgctgctggggccgcgccgccgccgatgccgatgtaccccacgatggtattctttgccgatgccgtggatgcacccatcgtatcccatgggntggatcgcaggtgccgctcgtgccaattcctcggc

SEQ ID NO: 5468 - DNA, 705 bp, Zea mays
atggccccgggggaggaggtggcggtggtggtagcggtggcggtggaggcggtggttacggaggaccaggctatgggtccggatcagggtatggtgagggcggtggcagcggaggtgctgctggagggtatggacatggtggtggcggcggcggcggtggtggtgagggtgcgggagctggtggctctgggtatgggtccgggcaaggatctggctacggagctggcagcggtgctgccggtggatatgggagtggcggaggtggtggaggtggcggtggccagggtggtggttccggatatggccatggaggtggtgaaggatacggctctgggtctggctttggtggtggtgctgccggcggcggcggtggacatggtggcggtggtggtggtggccaaggtgggtctggctatggctctggttcaggatatggatcaggtgaaggatacggacaaggtggtgctcatggaggaggctatggaagcggtggtggcggtggtggcggcggtggtcaaggtggtggtggctctggctatggatctggatccggctccggttatggaggcggcaacgacaacggacattattaggctctttttaagagctagatacatgttatacaaatatgtcaccagacatgagtctgtcttgttgcatgggatgctagctgtgtccatcgtgtgtgtaacaccgcaaggcttg

SEQ ID NO: 5469 - DNA, 624 bp, Zea mays
atgccgggccccacccaggcctccaccggtaacggcaccaccacgtccccgatcgagatcggcacacgagccccaccccgccggcccagcacagcccgcgtggcatgtgatacccgcggatacccacaccccgccacaaccccatccccccggcagaggcaggccgctccgcaccaacttctcgcccccgctcccccttcgtccatcccgttggcccccacccacagggactaccacccaccagatgcagatggtgatgtcgtccttcgacgcggtgcccggcgccggcgcggcgaggccgtacacggcgctggcgctgcagaccatctcgcggcacttccggtcgctgcgcgacgccgtcggcgcgcaggtgcagtcgctgcggcggagcctgggcgagaaggacgggtccgcgcagggaggcgggctgccccggctgcgctacatcgaccagcagctgcggcagcagcgcgccatgcagcagttcggcatgatgcagcagccgcagcacgcctggcgcccgcagcgcggcctcccggagtccgccgtctccgtgctccgcgcctggctcttcgagcatttcctccacccgtacccgaaagattccgagaagctgatgctcgc

SEQ ID NO: 5470 - DNA, 273 bp, Zea mays
atgggagggcggcggcggccggcggggccggcggtggggagggcggcggagctggactggtggtcaaggagcggattctgcccgtcgagctgcacaaggaggccacggaggcctacatgtcgtacgccatgtccgtgctgctcggccgtgcgctccccgacgtccgtgacggtctcaagcccgtccaccgcaggatactctatgccatgcatgagatgggccttgcgtctcgtaggccattcagaaaatgtgccagagttgttggtgaggtac

SEQ ID NO: 5471 - DNA, 939 bp, Zea mays
atggccggcgtccccgtcccgcccgatctcctccgccccgccccccacgccgccgccttctccttcgccagccccgccgcgtcgcccttctaccatcaccaccaccaccacccgtccctgagttactacgcctactacgggaagaagctggacccggagccgtggcggtgccgccgcaccgacggcaagaagtggcggtgctccaaggaggcgcaccccgactccaagtactgcgagcgccacatgcaccgtggccgcaaccgttcaagaaagcctgtggaatccaagaccgcctcctcgccgccccagctgtccaccgtcgtcaccaccaccaccacccgggaggccgccgccgcgacgccccttgagtccctcgcgggggcggggggtaaggctcacggcctgtccctcggcggcggggctggctcgtcgcacctcagcgtcgacgcttcgaacgctcactttcgctatggcagcaagtaccctcttggagctaaatccgatgctggcgagctgagcttcttctcaggagcaccagggaactccaggggcttcaccattgattctccagcagataactcttggcactccctgccatccaacgtgcccccgtttacactgtccaagggcagagactctggcctcctgcccggtgcctactcctactcccacattgaaccaccgcaggtgctcggccaggtcaccatcgcctcgctgtcacaggaccaggagcgccaccagtcgtcgttcagcagcggcggggccggcgctggtggattgctggggagcgtgaagcaggagaaccagccgctgaggcccttcttcgacgagtggcctgggacgcgggacgcgtgggcggagatggacgacgcgaggtccagtaggacctccttctcgacgacccagctctccatctccattccgatgcccagatgtgat

SEQ ID NO: 5472 - DNA, 744 bp, Zea mays
atgggaccgttctttggccttgttacagctcctctgctcggcaaggtacgggtagttggactcggtggtgacgcctccgttcctctggatgtactggaacgcgtagtccatgaggccgccgtcgcagccttggttgtccacgtcgtcgcagtccacgagctcctgctccgacagggacaccagcttcccggtcatgatcttgttgacgccctccacggccgcgatggccgagaacgcccagcagctcccgcactggccttggtccttgacgccggtgaccgcgccgcggagccgccagtcgaccgcgggcggcaggttcgtcgtcccgctcccgccccggccatgctgcgcgtgcgcgaagctcctcgcctcgcccagctgggcgcggtggtggcgcgtccgggagccagcgtacgtgcgccggaactcgtccgtggtcatgtccgcgaacttgttcagcgccagccggaacggccggccgtccttcctgttcgcctcgtggacgtaccgcgcgttctccttgaacacgttgaaccggcgcgcctgctgctgcttgtcgtccccgtcccgcggcgacaccctgtggtagtggctgcgccaccgctcgtacagcgctcgcaggctctcctccgacgccaggtcccgctcgctgaacgggatgccccgcgccgccggagccagtgcgagcgcggcgagcaacaccgcagccagcaccaggcacctcgacattgtgcggtgtgtgag

SEQ ID NO: 5473 - DNA, 939 bp, Zea mays
atggagaccatggctaagtacaaccgaagcaacccggcagtgaagcggatcctgcaggaggttaaggagatgcagtccaacccctcacccgacttcatggccctccccctcgaggaagacatcttcgagtggcaatttgctatccttggcccgagagacagcgagtttgagggtggaatctatcatggcaggatccagcttccctcggattatccattcaagccgccgtccttcatgctactcacgccaagtggacgctttgagattcagaagaagatttgtttgagcatatccaattatcaccctgagcactggcagccatcatggagtgtgcgcacagcgttggtggccttgattgcattcatgccaaccaaccctggtggggcattgggctcattggattacaaaaaggaagatagacgggcacttggtataaaatcacgtgaagcaccgccaaaatttgggtccccagaacgacaaaaactaattgatgagatccatgagcaaatgctcagtaaggctcctcctgtcccccaaacgctaccaaatgtgccaaacgaggagtctaacgaattacccgcatctgacccttctggcgagcatgcagacaaggtagatgaaggtgacaacacatctggttctgtatcagactcgtctagtggccttcctgtgcctgaatctgaatcgggggttacagaaaacactggtgaaacctcagcagttgaggttgccaaccatcatgtgcctgaagcaagccacagagagaacattccaagagttagttcgtctcaccagaatcctgctgttgcgatccagaagccaaatcatgacaggctgttgaccttggccgcatttgggctgactcttgctattatggcacttgtgatcaagaaattcttaaaaatcaatggcttgggcggtttcattgagggcaagttc

SEQ ID NO: 5474 - DNA, 450 bp, Zea mays
atgacgagaggcggggaaagctcagcagaggatggcctccatgctctccgtctgcacgcacaggcacacgggacacggcatggcgccgccgcagagggacagtgcctgcaggggaggagcaccacgaaggccggcctgaggcggcagcttaggcacgcgtggtctggcggcggccctgcgcagcgagggtccacgaatgccgacgccgacgactccgcctggctggccgacgtcgcccgctgtggcggcgagctcctcgaccgaccagctacgcgtgcagggcgaccgcggcagcctgctcggagagcgccttggcctgccacgccgtcgtctcgcctcggagacgcgctagccgctcctccagctcggcgccgcgccacgcctcgcgctccgcctccgccgcccagagggacaggtgcctgcaggggaggagcaccacggaggccggcc

SEQ ID NO: 5475 - DNA, 456 bp, Zea mays
atgtacctgcctccggcggtgttgtcgcccatcgcctcgtacgcgagtacgtgcgcctcggccaccgtctccacgttcgccgtggcgagcaggccgtcggcgagcattgcacgagcccctttgagatacgcgatggacgcggtggagttgcggcggcggaaccccgggccggtgacgagcgcggggcagatggtgaccagcttcaggtctcgtccccgcgccgccctccaggcagccttttccgctgccgtcttgccgagcgcaaaccacagcttgttgtcgcggcaaaagctctcgtcgctccagcagctctcgtcgatgatggtagggcaccgcccggccatgagggttgttctgcctccacacacatgccagcaaggaagaggtgaagacacatttcctgacggaccctgtcctgacgcaggcttcgatcacccgctccgctgcctgggcttc

SEQ ID NO: 5476 - DNA, 462 bp, Zea mays
atggatccatccgaagggtggagcactacgccatgcgtggttgacatgcttggccgagccagccagctggatgacgccaaggcgttcatagaagacggaccgttcaaggacagcgctcttctgtggcagtcgctgatgggagcttgcagcttccacaagaactcaggagttggtgaatgtgcggcagagaagttgctcctcctggaccctgactgcactgccgcttacgtcttgctctcgaacgtgtactcgtccgagggcagatgggacgacagggccaggatcatgaagaggatgagagctaggggcttgaggaaggacactggcaagagctggattgagctggaaaaggaggtccgttcttttgccgctgggccaacaaggtctcgccctgatgatgtgctggtgcagttgtccgcagttgccagtgatcaagaagatgtagtagagagcagtgctttg

SEQ ID NO: 5477 - DNA, 381 bp, Zea mays
atgagcgccatgacgcaggcggagatgatgaactgcattggcaacggaggggtggtccgcaacggcggcggcggcgcgcggaagcgcgacttccccgaggacgggtgcaccgagaagaccgtggagcgacggcagcgccgcatgatcaagaaccgcgagtccgcggcccggtcacgcgcccggaagcaggcgtataccgtggagcttgaggctgagctgaaccatctcaaggaggagaacgagcgcctcagagcagaggagaggacgattctgctgtcgaagaaaaagatgctggtggagaagatgatggagcaggcaagggagaatgtgagcgccaagaaggtcggtcccggactgcgccggtggggcagcgccatgtgg

SEQ ID NO: 5478 - DNA, 870 bp, Zea mays
atggctctggcgctggcccccatctcttccgcctcggccggcggcggcggcggcgccgcagcccccgggcagcagcagcagcacggcgggttctccatcggtagccccccgtccgaccccagcgccaagcgccgcggccggccccccggctccggcaagaagaagcagttcgaggccctgggttcttggggcatcgctttcacccctcacatcctcgccgtcaaggcaggcgaggatgttgcttcaaaaataatgacattctcacagcaaggccctcgcacagtctgcatcctctcggcgaatggcgcgattagcaacgttacgcttcggcagccagccacatctggtggactagttacttatgaggggcgtttcgagataatctcgctgtccggttctttcctgctcgcggaggatggtgacactcgcagcaggactggtggcttgagcgtcgcgctcgcgggatctgacggccgagttcttggagggtgtgtcgctggaatgcttatggctgcaactcctgtccaggtcgtggtggctagttttatcgcagaggggaagaaatctaagccagccgaagcgcggaaggtcgaaccgatggctgctcccccgccgccgccgccacagatggctgccttcgtgccggctccggtggccaccagccctccgtcggaggggacgtccagcgcgtcgtctgatgactccggcagcccgatcaaccacggtgcgatgccgttcagccactccagtcagcaccagcaccctcaccagcaccagcagcacatgccgcctgcctacgcgtccgggggctggtccctctcggtgcaccagcagaacaggcatgattctgacatgaagatgatgtcgaac

SEQ ID NO: 5479 - DNA, 222 bp, Zea mays
atgctgcactcgtcctccctgcccaccggcgccggcgccggcgtcgtcgccttcgccaggagccccgcggcggagcccgagcccgagacggcctcctccctgagcccgacctccgtgctggacgcggcggcggcctacgtgccacgcacgggcaagcggcgccgcccgtggcgcgcgcgggacaacaacggcggcctcgcggacgtgcgtggactgcaccga

SEQ ID NO: 5480 - DNA, 915 bp, Zea mays
atgcagatcttcgtgaagacacttactggcaagacgatcacccttgaggtggagtcctcggacaccatcgacaatgtcaaggccaagatccaggacaaggagggcattccaccggaccagcagcggctcatctttgctggcaagcagctggaggatggccgtacccttgcagattacaacatccagaaggagagcaccctccacttggtgctgcgtctcaggggtggcatgcagatcttcgtgaagactcttactggcaagacgatcacccttgaggtggagtcctcagacaccattgacaacgtcaaggccaagatccaggacaaggagggcattccaccggaccagcagcggctgatcttcgccggcaagcagctggaggatggtcgcaccttggctgactacaacatccagaaggagagcaccctccacttggtgctccgcctcaggggtggcatgcagatctttgtgaagacattgactggcaagaccatcaccttggaggtggagtcgtctgacacaatcgataatgtcaaagccaagatccaggacaaggagggcattccaccggaccagcagcgcctgatctttgctggcaagcagctggaggatggccgtaccctcgccgactacaacatccagaaggagagcaccctccacctggtgctccgcttgcgaggtggtatgcagatctttgtgaagaccttgactggcaagaccataaccctggaggttgagagctccgacaccatcgacaacgtgaaggcgaagatccaggacaaagagggcatccccccagaccagcagcgtctgatcttcgccggcaagcagctggaggatggccgcaccctagcagactacaacatccagaaggagagcactctccacctggtgctccgcctccgcggtggtcag

SEQ ID NO: 5481 - DNA, 156 bp, Zea mays
atgtcgcgcacccgggcgcccgccgtggccgcgaacaccagcacgcgcgcgcacgccgactccgaggccagcgcccgcagcgccgcggccagcggggccagcagcagcagcagcagcaggcgcggcacgccgccggcctcgaaggccaccagcgcg

SEQ ID NO: 5482 - DNA, 822 bp, Zea mays
atgcagctttcccacacggcgccacgcatgcaggagcccgggcgccggcccgtaccgccgttcgcgggcgtcgacctccgccgccccaggggctaccccgctccggcggcgaaggaggcggaggaggagccggccccagctccggcgccgggcggcgacccgtgcccgcggtgcgggtcgcgggacaccaagttctgctactacaacaactacaacacgtcgcagccgcgccacttctgcaagtcgtgccgccgctactggaccaagggcgggtccctccgtaacgtccccgtcgggggcggcacccgcaagagcggctcctcgtcctcggcctcggcctcggcaacgccaacctcgaccggcgccgcacccaagagcccgaggtcgtccaagaactccaagcgtcgccgcgtcggcccggccccggcgccggaccccgcccctgccaccgccaccgccaccgctgacgtcgcgaacacggcaccgtcgacggaagccgcagcagcaacgcgtgccgcctcggagaagccagccgcgacggaacccgcagcggcaacgggtgccgcctcggagaagccggccgcgacggagctcgcagcagcggttgtctccacagagaaacctccggcggccgtcggcggtttcacggacacgtctactacggtgcccgagatcgggctcgcggatgtctgcagcggcggcgtgaaggagcttgtgccggacccgggccacttcgagtggccgtcgggttgcgatctggggtcctactggggcaccagcgtgttcgccgacaccgacccggcgctgttcctgaacctgccg

SEQ ID NO: 5483 - DNA, 318 bp, Zea mays
atggcagagttcaagatcggtaggctggatggccagccaccaagggtcagaaatgtgcccattgccgtcaccccggaaggattctggtgctgcccatcacaggccgcgcttcagaagacagcgaagagcccaaaccagcagggcaggcctagagggggagcatcccctgcaccatcgaaggcatcctcggttcagagggtgccaaccatttcttcagagaagagagcacagtccactcctactaggtccagaacccattcagatgagcaagtgtggccctccagcaaatgctgttgcctgcccctgatccgccaaatg

SEQ ID NO: 5484 - DNA, 660 bp, Zea mays
atgtcgtgcccgcacgtgagcgggctcgccgcgctgctccgcgcggcgcacccggagtggagcccggcagccatccggtcggcgctgatgacgacggcgtacaacgagtaccccggcggcggcaacggcatcctggacgtggccacggggcggccggccacgccgctggacgtgggcgccggccacgtcgaccccgcgaaggccgtcgacccggggctggtgtacgacatcgcggcggcggactacgtggacttcctctgcgccaacaactacgaggcggcgcagatcgcggcgctcaccaggcagcacgcgtccgaggggtgcagcgccaaccgcacctacgcggtgaccgcgctcaactacccgtccttctccgtggcgttcccggccgccggcggcacggcgaagcacacccgcacggtaaccaacgtcgggcagcccgggacgtacaaggtggccgcgagcgccgccgccggcggcaccccggtgacggtgaccgtggagccgtcgacgctgagcttcagcagggccggcgagaagcagagctacacggtgagcttcacggcgggcgggatgccgtcgggcaccaacgggttcgggcggctcgtctggtccagcgaccaccacgtggtcgccagcccgatcgcggcgacgtggacc

SEQ ID NO: 5485 - DNA, 552 bp, Zea mays
  misc_feature (413)..(413): n = any nucleotide
  misc_feature (419)..(419): n = any nucleotide
  misc_feature (499)..(500): n = any nucleotide
atgggcggcagcgcggatgcgaacggcgcggggtcggtgcgggtgccggtgccgccggcgcggccgttcctggacacgttccgcgggaacctcaaggagaccttcttcccggacgacccgttccgcggggtggtgcgggagcgcggggccgggcggcggaccgtggccgcgctgcgctacttcttcccgttcctcgagtgggcgccggcctacgcgctgtccaccttcaagtccgacctgatcgccggcatcaccatcgccagcctcgccatcccgcagggcatcagctacgccaagctcgccaacctgccgcccgtgctcggactctactcgagcttcgtgccgccgctggtgtacgcgctgatggggagctccaaggacctggcggtggggacggtggcggttaacacagnaggtcngcggtcatggaagtcgaaatccgctacggagtgtggaacacctcaccctccggggtcactcagccccccgaatggctggnncctgaagcgcgccccccaccccccgccccttgggccgcgcgacatgccccgt

SEQ ID NO: 5486 - DNA, 777 bp, Zea mays
atgtactacccggctgaccagggggaagcgcccctcacggaggaggagcgcgcagagcggctcagggggatgaccaaggagataaacaagccgaacaccaggctacatggcagagccacggctgatgacgcgaggcccaaggaggagggggctgccatactttacgcgctagttgcaggctctactccgggagggatggcctaccacgaccctgacaagttgaagaagtacgatctggaggacctgaggaagaccccgaaccctttctacctcgagtcggacaagaaggccggcaacgggtacagttttgtgaggacgccgtcgccggcacccggcgtggacgagtcgccgttcatgacgtggggtgagatcgatggaacgccgctgaggctggactcggatgagacgccgggcggtagcgagagagcgcatttcaagatgccgccgcctcctgctcgcgatgtcaaggcgcacctgctttcgagggacgccgctcggaaaataaaggagcggtctaataccttccataggccgcccctaccctcccctgcgaggggtgtcagcgcaagccctagaaccctctcgcgggccgcacaaaaattcgtgaggaacgccatcaccaagtcggcaaagtcctccagcgccattgacgaatctctccgtgcaagctacagaggctcgaccccatctgcgagcactcccaagtcaaggttttcaaaagaccctggcctcgcatcgcgttctccatccacaaggcagggttccacccctccctgg

SEQ ID NO: 5487 - DNA, 909 bp, Zea mays
atggcccgtcgcgccgtcgccttgctcgtcgccgtcgcgctcgcgaccgtgctcctgcatacggcggaggttgcggcggggcagaagaagccggcgacggccgcgaggcgggaggacatcccctacatccggtgccaggtgtgcgagcggatcgcgcgcgagatctccgcgcaggtcgccaagaagcaccaggctctcccgccctccaagaaggtaccggagatcgagatcatcgaggtcgcggagaatgtctgcaacctaaagaagcaggaggcggattggatgcttcggatcgatatcgtcgagaaaggcgacaagctcgagcttgttgagcaagatgaggaagggcattgcaatgcagaatgcaagaccattgagcgtgcatgtcaggaggtgataggatatgctgataccgatgttgctgagtttgtatacaaaaataacccctcggtcgatcagcttatgaaatttctctgcaaagatctttcgaaagcatgtgccaaggacccaccgccagttccaaaagatcgtgtccctggggaaccatttgcaaggaagccatcaaaggatgctgagatggaaaagatattgagatcaatggagggtatgccgggagccccaagcatgaaaatgtactccagggacgatctgatgaaaaataactttggtactgaagacgacgacgaggaggatgatgaagatgaggatgacaacttcccaaagaacttggggaaagctctgaaaaacaagggctctcaaaagaaagatttgaaacagcaagtcgtgcagcagttcaaggataccagcaagaagttgaaagggcatgtaaacaaggtgtccggtatggtaaagaaatggtggaaaggggcaaagaagcctgccaaatccagcaaaagcaaaactgagctc

SEQ ID NO: 5488 - DNA, 552 bp, Zea mays
atgcgttgcatgcatgcagtacctctcgtacgtgggaaagcaatcaaacggaaccatgcatcactgaaacggaaccatgcatggaatggaagggaggcagcgcaaggcgatgatgagacggagaggcgctcagcacttgaagccggtgggcacggtcctgccgcagtagttgaggatgaggctgagatcgaccggcaggttgaggttgatgccgaggatgttgcccttgatagcagtgcagaggcaggcggcggcctccaggtcgacgagcccctccagcagcgggcagcatggctccgcgggcggcgcgcccaccttagccttgatgaggcccagcacgttggcgcacacgcccaacttgagcgcgtcgcgggggcacctgccgaacgacgacggcgtgggcgtcggcgtcggcgtcgagggggtcgagcagttgggcgtgcaggcgttggctacgcccagcaccaccaggttcacggccaggaacagcgcgaatgccttggacgccattgctcgatcacaacaagcagccagctacctcgcggatcacgc

SEQ ID NO: 5489 - DNA, 408 bp, Zea mays
atggacaggccaggccaccaccagcaccattttttcatgccgccgccgccgcagcagcagcagcagcagctttgcgtgccgatgatggacgacccgtcgtcgttcttggcggagctgatgggcgtcggcggcggaggcggaggtgggccgtcgtcgtccgcgaggggggagaggaagcggcggttcacggaggagcagatacggtcgctggagtccacgttccgcgcgcgccacggccacgccaagctggagccccgggagaaggcggaactggcgcgggagctgggcctgcagccgcggcaggtggccatctggttccagaacaagcgcgcccgctggcgctccaagcagctcgagcacgactacgtccgtgctccgcgccaagtttcgacgacctccacgcccgcg

SEQ ID NO: 5490 - DNA, 963 bp, Zea mays
atgcccaaatattccaagttcacacagcaggagctgcccgcttgcaagccgattcttactccaaaatgggttgtctctgttttcttaatcgttggggtcatctttgttcctattggtgttgtttcactgctagctgcaagagatgttgttgagattattgatcggtatgatgaggcatgtgtgccagttaacatgactgagaacaagcttgcttacatccagaatgagaccatatccaaagagtgcataaggaatcttacggttacaaaatatatgaagcagcctatttttgtgtattatgaacttgataacttctatcagaaccataggagatatgtaaagagccgaaatgatgcgcaactaagagatgctagtaaagctaaccagacatccgcttgtgaacctgagaagaccacagctaatgggcaaccaattgttccttgcggccttattgcttggagcttgtttaatgatacatataatttcactcgtggtaatgagaacttgacagtggacaagaaagacatctcctggaagagtgatagggagcataaatttggtaaagatgtctatccgagcaacttccagaatggtgcacttaaaggtggagcaacacttaacccaaagatcccgttgagtgagcaagaggacctcattgtttggatgcggaccgcagcacttccgacgttcagaaagttatatggcagactatactttgacctcaaggagaatgacacaataacagtgagattgaataacaactacaatacatatagctttggtggcaagaaaaagctggtcctctccactgcaacctggcttggggggaagaacgattttcttggctttgcataccttatagttggtgggctctgcattttcctggcatttgcattcaccttgctgtacttcgtaaaaccaaggaaactgggagaccacaactacttatcctggaacagacgc

SEQ ID NO: 5491 - DNA, 174 bp, Zea mays
atggccatgggacgcatacagcatccattgctgctggcaatcatggaattcctgttgttgtggctgggcatcaatttggaaatgcaagcggcatggctcctcgtgcacacattgctgtctataaagctctttacaaaagctttggtggttttgctgctgatgttgtggctgcaa

SEQ ID NO: 5492 - DNA, 399 bp, Zea mays
  misc_feature (93)..(93): n = any nucleotide
atgcacgctccgcccacgggccaccacaacagagacacggcgcctgcgttgcacagaaaccggcgcgggggcgcacaaccccagcaccaaacnccccgagcgggtgaaggtgacgaccggggaggcgtggtgcgtggcgaacgcgatggccggggagcatcggctccaggcggcgctggactacgcgtgcggccccggcggcgcggactgcaaggccatccagcccggcgcggcgtgcttcgagcccaacaccatggtcgcgcacgcatcctacgccttcaacgactactaccagcgcaagggccggtccatcggaacctgcgacttcgccggcgccgcctacgtcgtcaaccaggcaccgaagatgggcaagtgcgacctcccatcgacggtctgaac

SEQ ID NO: 5493 - DNA, 534 bp, Zea mays
atgggcgccgacacgtcggcggtcgacgcgcgcgggaggactccgctggacgtcgcgcgcgacaagggataccaagaagtggtggacgtcctggaacggtgggagctggtgatgacggcggcgaggcgaggcgacctcgggagcctcgagtccctgctcagcaagcgcgccggcgtccgcgggcgcgaccagtacggcctcacggcgctgcacctggccgcgatcaagggacacggcgacgcgatcgcgctgctcgccgggccgggatgcatggacgtcgagtgcgaggacgtggaagggcacaggccgctccacctcgccgtcgagggaggccacgcggaggccgtggagctgctgctcgacatgggcgccgacgccaacgcccggaccaggcgcggcgccacgccgctccagatggcggaggccatggggtacgaggccatcgctcagctcctgtgcgcgagaggtgcggaggtggccgccgcgtcggcgttgtgcgccgcgtcgtcgtcttcatcgtccatatcgtgcgcc

SEQ ID NO: 5494 - DNA, 1317 bp, Zea mays
atggctagttctctacttcagcagctgctgtctctgctgctgctcctgctgccctctcctcttcgtctccgggagcatctatcaggaaaccatgctgtcagcgccaacaacttccaccccatctttctggtagctggggtgagctgcagcgacctggaggcacgcctcaccgaggagtaccggccgtcggtgccgcactgcggcgccatgaaggggaaggggtggttcggtctgtggaagaacagttcggagctgctgtctcgtgactacgtgcagtgcttcgaggagcagatgagcctcgtctacgaccctgccatcaacgagtaccggaacctcgccggcgtcgagacgcgagtgcccaacttcggctccacaagagccttcagccacaagaaccccctcaagtcagactggtgcctcggaaagctgagagccgcactggaagacatgggataccgagacggagacaccatgttcggagccccctacgacttccgctacgcgccgccgtcccccggccagacgtccgaggtgtactcccgctacttcaaggagctgatggagctggtcgaggccgcgagcgagaggacccggaagaaggccgtcatcctcggccacagcttcggcggcatggtcgcgctcgagttcgtccggaacactccgccggcgtggcggcgcgagcacatcgagcgcctcgtcctggtcgcgccgacgctccccggcgggttcctggagccggtgcgcaacttcgcgtccgggacggacatcctctacgtgccagcgacgacgccgctggccacgcgagccatgtggaggagcttcgagagcgccatcgtgaacttcccgtcgccggccgtgttcgggcgcctgcaggcgccgctcgtggtcaccagggagcggaactactccgcgtccgcgcacgacatggagcgcttcctcgccgccgtcggctccggcgaggccgcggagcccttcaggagacgggccgtccccaagatgggcagcttcgcggcgccgatggtgcccatgacgtacatcagcggggtcggcaacaggacgccgctgcggctggtgttctggggcgaagacttcgacgcggccccggaggtggcggcgtacggggacggagatggcaagatcaatttgatcagcgtcttggcgtttgagaaggagatgcgtcggcagccggagcagaagaagcagttcaaatccatcaagatcaataaggcccagcattctacgatcgtcacggatgattttgccctgcacagggtcattcaagaaattgttgaggccaataatcagaagattccatcc

SEQ ID NO: 5495 - DNA, 693 bp, Zea mays
atgccggcggccatggcggctgcggcggcgcagaggctcctcgcggcgagcacgaaaatcatcggcgttgggcgcaactacatagcccacgccaaggagctcggcaatccggtccccaaggagcccgtcctgttcctgaagccgacctcgtcgtttctccacgctggtgtggccaccgccgccgtcgagatcccggagccgctcgagtcgctacaccacgaggtcgagctcgccgtcgtcatctcccggcgtgggcgcgacgttcccgaggcgtccgccatggactttgttggaggttatgcacttgctttggacatgacagcaagggaccttcagtctgttgctaagtctgcaggccttccatggactttggctaaaggacaagacaccttcaccccaattagtgcagtagttccaaaatcagctgtcactaatcccgatgatctcgagctctggctgaaggtagatgatgaactaaggcagaaaggaccgacaagcgacatgctattcaagattccttttctgataagctatatcagttccatcatgacattaatggagggtgatgtgatactaacaggtactcctgagggtgtgggtcctgtccgagtaggtcagaagattacagctggtataactgacctaattgatgttgagttcgatgttcagaggcgcaatcggtcattttccaca

SEQ ID NO: 5496 - DNA, 318 bp, Zea mays
atggccaccttcgagctgtaccggaggtccaccatcggcatgtgcctcaccgagacgctcgacgagatggtctccaacggcaccctcagcccggagctcgctatccaggtcctcgtccagttcgacaagtccatgacggatgctctggagaaccaagtgaagagcaaggttactgtcaagggtcacctgcacacctacaggttctgtgacaatgtgtggaccttcatcttgacagacgcaagcttcaagaacgaggaggccacggagcaggtgggcaaggtgaagattgtggcatgtgattccaaattgctcggacaa

SEQ ID NO: 5497 - DNA, 438 bp, Zea mays
atgtcacatagtcactgtgtgaaaatgtttttagacaggaagcgctcgaaatgtgccacaacttcaccgttttatccattgaagatgaaagtaagtactgggatttggaccagcagagatcaagcacatcttctgaatgccccacgaaggtccgaatcggcttttctgacagtgcaaacacatgctctggcaccattagccggtctgagctcacagacctacgaccctccaagaaccttgcccgacgcttcttctcacgattgctcccatccagactgctggccaaggctaatgttgtctccggtgaaccgttgcacgccatggcaacaagaggattgcacagtccgttctcctcgcgtttcctctcaaactcggacacttcccagacatggatcacgcagtcttccccagcactcgcgaggtaccggccatctggac

SEQ ID NO: 5498 - DNA, 591 bp, Zea mays
atgaagaagatgcggtcgacgacgaaggccggtctaaacgctcgaccagaccgaggtgcgcgtcggaaaaaccaaactcaagctcatcagcgagcacaggtaaagcccctggaaccggcagtggtggcggaggcacataggggggatgcgcctcgggcgcgaacgggctgtagggctcgtgcaccggggtcggcgggcgcaccagttcggcgcgggacggcgagtagggcgggtggagtggatccgtctccagcggcggcgcgtccgcggaggcggccgaggacgagggagacgacgaagacagcatcggagtgcccagcgcgaggtcggagccgagatcggggcgtggggcgcgcggggcccgggggagaccgaggtagaggttcagatccatccgtctgctgctccgcgccgcgtcatcggcggccatccggcgggcgagacgcccgccttaattgtagcgcgctatcacacctcttcctccgccggcgcggtcgcgaagctcacgccttcctagctccgccccaccatggcaggccccggcgcggggcccgcgcgaacaggctaaagaaaccgctggagttcggcgca

SEQ ID NO: 5499 - DNA, 258 bp, Zea mays
atgcatcaatttcacagcttccctcatgaacaccgaagaatcggcgcccttccaacgggggtcggaatccgggaaaatctgcccgatgtccggcagccccagcgcgccgagaatcgcgtccaccacgcagtgcagcagcacgtctccgtcagagtgagcctcgcagccgcggtcgtgggggatgtcgatgccgccgatgatgagcgggaggttgggctccaggcggtggaggtcgaagccgtggcccacgcggaacgg

SEQ ID NO: 5500 - DNA, 357 bp, Zea mays
atggaggagaacaggaacctgccgcaggaggcgttcgacacggtggagctcgccaaggctgccgtggagagcaagtgccccgggatcgtctcctgcgccgacgtcctcgccctcgccgcccgagactacgtccagctggtgggtgggccgtactacgcggtgaagaagggccggaaggacagcaaggtgtccctggcggggaaggtccgcggcagcctgccgcgggccaactcgacggtggacgagctcctgcgcgtgttcgcgggcaagggcctgggcgcggcggacctggtggcgctctccggcgcgcacaccgtcggtttcgcgcactgcgtacacctgctgtgccttctctac

SEQ ID NO: 5501 - DNA, 537 bp, Zea mays
atgcagcaggaccagcggaacaagacttctgcagaggtcgacttcttcacagagtacggggatgcgaaccggtacaagatccaagaggtcatcggcaagggaagctacggggtcgtctgctctgccatcgatctccacactcggcagagggtggcgatcaagaagatacatggcatcttcgagcacgtctccgatgccgcgaggatcctccgcgagatcaagcttctgaggctcctgaggcaccctgacattgtcgagatcaagcacattatgctgcctccctcgagaaaggacttcaaggacattttcgttgtttttgagctcatggagtccgacctccaccaagttataaaggccaacgatgacttgaccaaggagcattaccagttctttctctatcagttacttcgggccctcaaatacattcatactgctaatgtttaccaccgtgacctcaagcccaagaatattttagcaaactctaactgcaaatttgaaaatatgtggactttgggactagcccgagtcggcattcaa

SEQ ID NO: 5502 - DNA, 414 bp, Zea mays
atgtttcgctgctcttcctataatcctatacctcgcctacaaaattatagaaagtgcgtagggacacggaacaggaatcagagcgcaagcttgaggttgtcaggacaggagtcgctgacgtccggccgtcggtacggctccgtgcggacggcggcgacccgagccttgcgcttctccatgaaccgctgcagcgacgccttcctcgcaactggcaggtcagcgcccgcagacgcagagccggagacatggtcgcggcgcttggcaccgatcgcctctgtttctgcacgttccgctgctgcgccggcggcgaggcgaagcaggcccgccgccttgtcggcggggacgtcagcgagcaccagcacacgccctccgtacacgatggtcaactgcgccggcgccggcgccggcgccgcc

SEQ ID NO: 5503 - DNA, 627 bp, Zea mays
atggagccgtacgcggcgacgaagggcggcgagtccgacgccggcaccggcctggaagagtcgatgcggaagctggggctcggcgaggacgacgaagcgggggaggagaagcttccggagcggccgggcgaggcggactgcacctactacctccgcactggcgcctgcggctacggggagcgctgccgctacaaccacccccgggatcggccggctccggttaatggcgttgggaagaccacaggtatggagtacccagagcgccctggacagccactctgtgagtactatgcaaagaatggcacatgcaaatttggttccaattgcaagtttgatcatcccagggaaagtggttttgtacctgtcgctttaaacaacagtggattccctctacgtctgggtgaaaaggaatgttcgtattacatgaaaactggacattgcaaatttggaggtacatgtaaatccatcacccagaacttggttttcttacagagacgcctggcatgtacccaccagttcaaccatcacctatttcctccccacatccatatccacatcattccaactggcaaatggggaggcctgctgttgtgccagggtcatttttaccaggcccatatccaccaa

SEQ ID NO: 5504 - DNA, 630 bp, Zea mays
atgatgctgggaaagagatctgggcgcccgtcgccggcggcgcggcagcacatgcggcggaccacgagcatgacggagttcgcggcaccgcacgtgctggtagacgtcgcggaggaggaggaggacgaggagctgcagctgctgccggcgcacgccgaggccacaggggaggcggccgagcaggaggaccccctacgggtgggccatcggcggccgccgcggcggcccgggcgcgcggactggctgggcggcgtaccgcgcccgcgcggcgccggcacctggcggggcacgccggaactcggccgacttctcggctgccgagaccgccgcgttcctccgcgccctgcgggctctgcaacccgccgcctcggaccccggccgcgacaccttcatgtacaggggcgacacggcgttctgcagcctcgagtgccggcagcagcacatcacgatcgaggagtggaaggagaagtgcgcgctcgccacgccgccgacggcgccggcgtccgacccggtggtgccgctgccgcccagcggcgcgggctccgacaaaccaggcacgctcgccgccgcatcctgattagtcatgagggagggggtcggaggcgatcgatgatccgactccggctaagc

SEQ ID NO: 5505 - DNA, 519 bp, Zea mays
atggcgtgcgtgaaaaagaagaaaggggggcagaaacgcttcgacggttattcagccacgttaaccaattcatactctacaagggacaagttgttgtcttccttcactgtgaagctggctggctctgtagcctcaatccgcccccatttgtccactgcaagcctcattgatcctttgaacatgtcgattttggcattgcgcaagatcaccgtggcatcgggcttcagcaaatcaacttggtcgttgcgggcggtgaatacgatgacgccggtctcgtctccgacgaggcactcggcgatgcgcggcgcgcgggacgaggcggcggcgggtgcgcccgggcgcgcgcggcccggcacgggggtggcgctgacgaccttgacggtgagggtgtgcccgttagtgcccggcttgagctggtcgaccttggtgaagacgggcttccggagcgccggcttgtcgctaccgccctgtgccgccgcggtggccatcgccggtagtggggtggggtgggtggaggac

SEQ ID NO: 5506 - DNA, 660 bp, Zea mays
atgtgctacgcccgcgatacagagagcagaagcccaggggtgaaggaggcacacggcaagggcgccgacgaggaaggagaaagaggaaggggaacgggacaaaccgctcgccggagggttatacgccggacaaggcccgttccccgaacgggtagccccaggggccgcgcttcgccgaagccttcgaacaccttcgcggcggctccatcgcgttctccatcctcatcgtcatcgtcagcggagaaaaacagtcggcggcggatatcgctgcgggacctcataagccgcacgggcggcgactgcgcgggggcggcggaccaggcatcgtcgtcaggcaccgggagcgccgaggtcaccagcaggccgggtttctggccgccgtctatctggccatcgccgcgctcgtcgtccaataacttgccgctgccctgcccggcgccacagccgccgggccgccgctccgcattcatcggacagggccgcggcgccgggcggcggcggcggcggcagtgctcggcgcaccacgtcgctgccgtaccgacagagcctggttctcgggtgcctgggcttcggggctcgcagccggagctacggggctcgccaagtccacgcaccccctcttctcttcacgctgaacacgaaaagctagcaaacgaagga

SEQ ID NO: 5507 - DNA, 420 bp, Zea mays
atggcgagcggcagcatgaagagggagatcagcgagacccacgacaccctccgcttcggcctcaatgccggcgtcaaggccgacctcgcgccgccgcacccgctccagtccagcatccaatcggaggccaagttctgggcggacaagaagaagtttgggacagaggccatctacggatccgccttgaacatccgcaaggatctcgatgcccaaatcctctcaaggttccaaaggccccctggtgctttgccatcatctctgcttggatatgaggcactgacaggttccctagatgattttggttttgaagattatcttaacatgcctcaagattctgaaggtttccgtcaacctgacatgcaccacggaatggaggttcgccttggtttgtccaagggacctatctgccctagcttcagt

SEQ ID NO: 5508 - DNA, 585 bp, Zea mays
atgacatcgaacctcggcgccgagcacctcctcgctgggatggtgggcaagaactccatgaaggtcgctcgcgatctggtcatgcaggaggtgaggaggcacttccgccctgagctgctgaaccgtctcgacgagatcgtgatcttcgatcctctgtcccacgagcagctgaggaaggtcgctcgccttcagatgaaggatgtggccgtccgtcttgccgaaaggggcatcgctctggctgtgaccgacgccgcattggacatcatcttgtctctctcttacgatccggtgtacggcgcgcggccaataaggaggtggatcgagaagagggtggtgacgcagctgtcgaagatgctgatccaggaggagatcgacgagaactgcacggtctacatcgacgccgcgcccggtaaggacgaactggtctacagggtggaccggagcggcggtctggtgaacgctgagacggggatgaagtcggacatcctgatccaggtccccaccagctccaccaggagcgacgctgcgcaggccgtcaagaagatgaggatcatggaggaggacgaggacggcatggacgaggag

SEQ ID NO: 5509 - DNA, 960 bp, Zea mays
  misc_feature (960)..(960): n = any nucleotide
atgggaaactgttgccgctcgccggccgccgcggcgcgggaagacgtcaagtcgtcgcacttcccggcctccgccggcgggaagaagaagccccaccaggcgcggaacggcggcgggggcggcgccggggagaagaagcggctgtctgtgctcggggaggaggggtgcgacgttggcgccgggatcgaagagaagtacgcgctggaccgggagctcgggcgcggcgagttcggcgtgacgtacctgtgcatggaccgtggcacgcgggagctgctggcctgcaagtcgatctccaagcggaagctgcggacgcccgtcgacgtggaggacgtgcggcgggaggtggccatcatgcggcacctgcccaagagccccaccatcgtgtccctgcgggaggcgtgcgaggacgacggcgccgtgcacctcgtcatggagctctgcgagggaggggagctgttcgaccgcatcgtcgccaggggccattacacggaacgcgcggcggccgcggtcacgcgcaccatcctcgaggtcgtgcagctctgccatcgccacggcgtcatccaccgggacctcaagcccgagaacttcctcttcgccaacaagaaggagaactcgccgctcaaggccatcgacttcggcctctccatcttcttcaagcccggcgaaaagttttcggaaattgtgggaagcccatactacatggctcctgaagtcttgaagaggaactatggacctgaaatagacatatggagcgctggtgttatcttgtatattttgttatgtggtgttcctccattttgggctgagactgaacaaggagttgcacaagctattcttcggggaaatgtagattttaagcgagaaccctggcccaatgtttcagataatgctaaagatcttgttcggcagatgcttcaacctgatccaaagctcaggctaacagcaaagcaagttcttggn

SEQ ID NO: 5510 - DNA, 381 bp, Zea mays
atggctccatctccgcctcggcgtgctgcgctcctcctcgccacggtgcttctgctggcggcggccgggtccacccccggcgccacggctgctggcatcttccaggtgcgccgcaagttcaccgccggggtgggagggggtgctggcgccaacatcagcgcccttcgcgcccacgatggcacccgtcacggccgcctcctcgcagccgccgacctccctcttggcggcctcggcctccccactgacactggcctctattacacggagatcaagctcggacgccacccaagcactactacgtccaggtcgacaccggcagcgacatcctctgggtcaactgcatcacctgcgagcaatgcccccacaagagcgggctcgggt

SEQ ID NO: 5511 - DNA, 336 bp, Zea mays
atgccaacaccaacccaaaacagaaaccaggtgggcatggggcacaacccgcccagacccggcgccgtggccgtcaacatccccggactgcgccaagatcttgggctacgagtaccgggagagcgggtgagcggcgcagaacgaccgcgcggacgaggacgcgcggctttcggcggcgccgggggccggcgctgggtcccgccccacgaggtgctgcaggggcgggagcgcgcggcggcgtccttctccgtgcgcgagggcgccgggcgcacgctcaagggccgcgacctccgccgcgtccgcaacgccatctgggagaagaccggcttccaggac

SEQ ID NO: 5512 - DNA, 303 bp, Zea mays
atgcttgcgaggcagatgcagaagcggctcacggcagaggaaagggagcgcctgtacaccaaatggggcatttcgctggactccaagaagaggaagctccaggtcgctcgccggctctggaccgaggccgaggacctagaacatgtcagggagagtgcctcccttgtcgccaagctgatcgggctccaggagccagggcaagtcctcagggagatgttcgggctcagctttgcgccgcagcagcagccgccccctcgccggcgatcctccaatggctggagatacgggatcccttcgttcggc

SEQ ID NO: 5513 - DNA, 504 bp, Zea mays
atgcacgagttccggatggagaacccccacaccccgcccaaggaggattgggtcctgtgcagggtcttctacaagaagaaggcagacgccatggactatgctgactgcagcgaccaggacgccatcgccgtgcatgtgcctcgcggcagcgctgacccgggctactgctactcgcctcctccgttccccgcgctcggcggcagccaccaccacggcggctccctcaacgacgacttccacggcggcatggcgctgcttcagcagcagcagcacaacggcgttttcgacttccacggcggccagcctcaccctcacggcggcgggcggcggcctccttgccgggccgccggctacagccgtggggtcaagagacggcggcgatcagtgtggcagcggcgtgctcatggacctaggactcgacgaccactacgcctacaacagctacaacagcctgctgcagatgtgatctatcatgcaagcaagcaagcaagctatatagctagc

SEQ ID NO: 5514 - DNA, 393 bp, Zea mays
atgtcgtggcagacatacgtcgatgagcacctcatgtgcgagatcgagggccaccacctgacctccgctgccatagtcggccacgacggcgccgtttgggcccagagcaccgcattcccacagttcaagacagaggagatgaccaacatcatgaaggacttcgacgagcccgggttcctggccccgaccggcctcttcctcggccccaccaagtacatggtcatccaaggcgagcccggcgctgtcatccgcgggaagaagggatctggaggcataactgtgaagaagacagggcaagcgatggtggtcggcatctacgacgagcccatgacccccggccagtgcaacatggtggtcgagaggctcggcgactacctcgtagagcaaggcctg

SEQ ID NO: 5515 - DNA, 288 bp, Zea mays
atgctcacgtcctccgccgccaccccgtccggcagccgccacgcgaacccgtgcaccaggttcgccacgccggcggcgaccagcttcatggcgagatcgtacgcggggcagatgcgtcggccggacccgaacggcagcagctcgaagtgcgccccgcgcacgtccacagcggcggcagcacccaggaaccgctccggctggaacgcgtcgggcgcgtcgggccacgacgccgggtcgcgcgcgatggcccacgcgttcaccagcacgcgcgcgcccgcggggacgtcg

SEQ ID NO: 5516 - DNA, 147 bp, Zea mays
  misc_feature (82)..(83): n = any nucleotide
  misc_feature (111)..(111): n = any nucleotide
atgtcagttgggcaagaagggcacgtcttcacaatcttctgtgcccttagagtccgaccaccacggcttctttcccttatannaagactggctatcatatgccccaagcanacaagtcttgcaaaagttgtgggcacatggagatcg

SEQ ID NO: 5517 - DNA, 459 bp, Zea mays
  misc_feature (20)..(20): n = any nucleotide
atggcttactctcccttcanccgcaacatctgcaggggaaacccatcaccgtgtaccgcgccaaggaccgcgtcgacttggcccgcgacttcacctacatcgacgacattgtcaagggctgcctcggctccctggacacggccggcaagagcaccggcaccggcggcaagaagcgcgggccggcgccctacaggatcttcaacctcggcaacaccgcgcccgtcacgttgcctaacctggtgtccatcctggagaagcacctcccgcgtcaaggccaagaagaacgtggtcgagatgcccggcaatggcgacgtgcccttcacccacgccaacatcaccctcgccaggcagcagctcgggtacaagcccaccaccaacctcgatgtcggcctcaagaagttcgtcaagtggtaccagtcctactacggctacaccaggggatccaagaactcgcgacaa

SEQ ID NO: 5518 - DNA, 789 bp, Zea mays
atggaaggcggactgagcccggagcggcacgcggcggctgagccggtgcggtcgcggtggacgcccaagccggagcagatactcatcctcgagtccatcttcaacagcggcatggtgaacccgcccaaggacgagacggtccgcatccgcaagctgctggagcgcttcggcgccgtgggcgacgccaacgtcttctactggttccagaaccgccgctcccgctcccgccggcgccagcgccagctgcaggcgcaggcggcggcggcggcggcggcctcctcgtcctcgtcgggatcgccccccacgagcggcctcgcgccgggacacgcgacggcttcgtcgacggcggggatgttcgcgcacggcgccacctacggctcgtctgcgtccgcgtcctggcccgccgccgccgtcgtgcgaggggatgatgggcaacctggattacggcgggcggcgacgaccctgttcgccatctcgcggcagatgggctacgccagcggcggtggctccgggctcggggtcctcggcggccatcgcacaccacgagcagcagcagcagcagctttactactcgccgtgccagccagcagcgagcatgacggtgttcatcaatggcgtggcgacggaggtgccgcgggggccgatcgacctgcggtccatgttcgggcaggacgtgatgctggtgcactccaccgccggcctcctccccgtcaacgagtacggcgtgctcacgcagagcctgcagatgggcgagagctacttcctggtcacgaggggctactaggtagc

SEQ ID NO: 5519 - DNA, 615 bp, Zea mays
atggaggcgctgctcccgaggtccggcggcgtcatctcgccaaagatcagcacgatcctgcagtcgcacgtgtacccgcggttcggccgcgtgctgcgcgcgctcgcccgggtcaagtcggcgctcctcgacgccctcggcaagaccaagtggggcgcgcggcggcggaagcagcacgcgccctccatcgcccgcggccgccgctcgaagaagaggaagagcagcaagggcgaattttcgaagaagccgccgcacctcacctggtccggcggcctgtcgccgcttcgaggcgcggccgtggatgcgctggacgtggactaccacgtgtacccgtcctgtgactatgagtcggtgtggaacgcggtcgtcgtgcccgcggcgaccggtgagtactgtgggtacctgcgctggctcgaggaggagatgccggacgaggtgggggtcgtggaggaggaggaggaggaggaggtggaggaagacgacggcgtcgcctctggcggcgggaacgagatcgaccggctagcggagcagttcatcgcgaggtgtcgtgccaacttcttgctggagaagcaggagtcgtacgaccggcgtcaggagatgatcgccaggagcctc

SEQ ID NO: 5520 - DNA, 678 bp, Zea mays
  misc_feature (535)..(535): n = any nucleotide
atggcgaccccgctccgcgccaccgcggtcctcgcgtggggttccggggaggacgggcagctgggcatgggcgggaacgaggagaaggactggccccacttcgttgaggcgctggggccctacgccgtcaccgccgtcgtcgccggcagccgcaactccctcgccatctgcgacgacggccgcctgttcacatggggatggaaccaacgcggcacgctcgggcacccgccggagaccaagacggagagctccccgggccccgtcgacgctctcgcgggtttcaagatcgtccaggcggcgattggcgggtggcattgcctcgcagttgacgacaaggggcgcgcctacgcctggggtggaaacgagtacgggcagtgtggtgaggagcctgagaggaaggaggacgggacgagggcgctcaggagggacatcccgatcccgcagcggtgcgcgctcaagctcaaagtccggcaagtagccgctggagggacacattcagtagttttgactcaagaaggtcacgtctggacatggngacagccatggcctccgggtgatatcaagcaaatatctacacctgttcgtgtgcaaggccttgagaaagtgagggtcattgctgttggtgccttccctattttgcccctaccggagatggattttcgtgggcctgggcttttc

SEQ ID NO: 5521 - DNA, 840 bp, Zea mays
  misc_feature (750)..(750): n = any nucleotide
atggcgaacaggggcttgcatctggctctgttcctcgtccttctcgggctgtcgtccaatttggcagccgggcagatcctgttccagggcttcaactgggagtcgtggaagcagaacgggggatggtacaacttcctgatgggcaaggtggacgacatcgccgaggccggcatcacgcacgtctggctccctccggcgtcacactctctcgccgagcaaggctacctgccggggcgcctgtacgaccttgacgcgtccaagtacggcaacgaggcgcagctcaagtccctgatcgaggcgttccacagcaagggcgtgaaggtcatcgccgacatcgtcatcaaccaccgcacggcggagcaccaggacggccgcggcatctactgcatcttcgagggcggcacgccggactcccgcctcgactggggcccccacatgatctgcagcgacgacagggcgtactccgacggcacggggaaccccgacaccggcgccgacttcggcggcgcgccggacatcgaccacctgaacccgcgcgtccagcaggagctcaccggctggctcaactggctcaagacggacgtcggcttcgacgcgtggcgcctcgacttcgccaagggctactccgccgacgtcgccaaggtctacatcgacggcacccagccctgcttcgcccgtcgccgagatatggacctcgctggcctacggcggcgacgggcaagcccttctacgaccagaacgcgcaccggnaggagcttggggagctggctggaacccctcctgggcaaggcagtcccggccccacgttcgacttccccccaaggcatcctcaagtggccg

SEQ ID NO: 5522 - DNA, 549 bp, Zea mays
atggcgggcgaggaagagctcactgtaggcggcggcgtgcccatccggccgccgcggctggaagacgcggggctcgaggactgcgcgctcccgccggagtctatcgctgaggcattctccctcgctgccgcggccgtctcctcccgcctcgcccggctgcccttctccgaagactccgacgaggaggactgcgtctcggcaccacgcggaggaggctgcgtggatgacgccggactcgactgcggggccgcccccgtctcccttgtcggcggcggcgttgcgggcgtcggcagcgtcgacgaagtcgtggtcgtcggcggaggacgcggaggcggatacgaggacgcggtagtggtcggtgggcgcgcagaagaggaggatacagtcgtggtggtcgcggaacagcctagggacagggagaagaaactggggaaggatgatggatgtgtcgagggggtgcgagaaggggtcagtgaacccagacgggcgcaaggcgatgaagacggcgaggaggcggcagagaaggcgatcttggtgccagatttcgac

SEQ ID NO: 5523 - DNA, 555 bp, Zea mays
atgcctgctgctctgctacagggcgacgcacgtcccggctgccggctccggcggcagggcggcgtggctggggatgctcgcggcggagctctggttcggcttctactgggtcatcacgcagtccgtgcgctggtgccccatccgccgccgcaccttccacgacaggctcgccgccaggttcggagagcggctcccctgcgtggacatcttcgtgtgcacagcggacccgcggtcggagccgccgagccttgtcgtggccacggtcctgtcggtgatggcgtacaactacccgcccgcgaagctgaacgtctacctctacgacgacggcggatacatgctgaccttctacgctctgagggaggactacgtcttatacaagcactgacctatcgttctgcaggaggctctgctctctctccctcgcctctccccccccttacttcctcctctcccctttccgtaacgcctctgcctatcctcccatgctccccccggcctgcggccgcgcacccgacaccctcccatcccgccaacgacgccgggaggcctctcccg

SEQ ID NO: 5524 - DNA, 540 bp, Zea mays
atggcgcggcgatccgcccctctcctgcgccgcctcgtctccgcctcctcaccgcccgcgctgcagtccctcacggaccacgtcggcgtcctcgcgcggcgcacggtgacctacatgccccggcccggggacggcgcaccgcgcgccgtcacgctcatcccaggcgacggcatcggccccctagtcacgggcgccgtgcggcaggtcatggaggcgatgcacgcgcccgtctacttcgagacctacgacgtccacggagacatgcccacggtcccgccagccatcatcgaatccatccgccgcaacaaggtctgcatcaagggcgggctcgccacgcccgtcggcggcggggtctcctccctcaacatgcagctgcgcaaggagctcgatctctacgcctcactcgtccactgctccaacctccccggcctgcccaccaggcacgagggtgtcgacatcgtcgtaatcagggagaacacgagggcgagtactcggggctcgagcacgaggtcgtacccggggtcgttgagagcctcaagg

SEQ ID NO: 5525 - DNA, 591 bp, Zea mays
atggcggacgcgaagcagcagcagcagcagccacagcaggcggcagcggcagccaccggcgtgtggaagacggtcaagcccttcgttaacggcggggcctctgggatgctcgcgacctgcgtcatccagcctatcgacatggtcaaggtgaggatccaattgggtgagggctccgctggtcaggtcacaaggaacatgcttgcaaatgagggtgtccgttctttctacaagggtttgtctgccggattgctgaggcaagcgacgtacacgactgctcgtcttggatcctttagggttctaactaacaaagcagttgaaaagaatgaagggaagccattgcctctaattcagaaagcttttattggtctgactgctggagcaattggtgcttgttttggtagtcctgctgatctggcactcattagaatggcagccgactcgaccctgccagctgcacaacgacgcaactataagaatgctttccatgcactctaccgtatcagtgctgatgagggagtccttgcgctttggaaggtgcaggtccactgtggtgagagctatggcactcaatatgggtatgcttgctttcta

SEQ ID NO: 5526 - DNA, 603 bp, Zea mays
atggccgccggggaccttgaggtgctcaccgcgctcgacaccgcgaagacgcaatggtaccacttcaccgccatcgtggtcgccggcatggggttcttcaccgacgcctacgacctcttctgcatctccctcgtgactaagctcctcggccgcatctactacaccgtggaggggtccgcgacgcccggcaccctcccgccgcacgtgtccgcgtccgtcaacggcgtggccttcgtgggcacgctgtcagggcagctcttcttcggctggctgggcgacaagctcgggcgcaagaaggtctatggcatgacgctcatgctcatggtcctctgttccgtcgcgtcggggctctcgttcggccacaccccggcgtccgtcatggcgacgctgtgcttcttccgcttctggctcgggttcggcatcggcggcgactacccgctgtcggcgaccatcatgtccgagtacgccaacaagaagacgcgcggcgcgttcatcgccgcggtgttcgcgatgcagggcttcggcatcatggccggcggcctcgtggccatcgtcgtgtccgcgtcgttcaagggcaggttccccgccccggcctacgccgtc

SEQ ID NO: 5527 - DNA, 357 bp, Zea mays
atggcgccgggctgcagctgcagtgggcgcaggggaaggccggcgaggaccgcgtccacgtcgtggtgtcggaggagcggggctgggtgttcgtcggcatctacgacggcttcaacggccccgacgccacggacttcctcgtctcccatctctacgccgccgtgcaccgcgagctccgcggcctgctctgggaccagcgcgacgcgcaccccgaccagccgaccacgaccagcaccacggcctcagatcaccaggaccgccgccgccgccgcgcccgccgctcgagaccgccgcgcggcgccgacgatgaccagcggcggtggaagtgcgagtgggagcgcgactgctccagcgccc

SEQ ID NO: 5528 - DNA, 477 bp, Zea mays
  misc_feature (394)..(394): n = any nucleotide
atggcgacttcgtcgtcgttctctggccccggcgggtccccggcccacgcgtctccgggaggcggaggcggcggcggcggcggcggtggcgtggggtcgtaccaccaccaccggtcgcggttcggcgacacgacgctgaccaaggtgttcgttggcgggctggcgtgggagacgccgtccgaggggctgcgccagcacttcgacgtctacggagagatactcgaggcggtcgtcatcaccgatcgcgagaccggccgctccaagggctacggtttcgtgattttccgggacccggacgcggcggcgcgggcggtgcagaacccgaacccggtgatcgccggccggcgcgccaactgcaacattgcggcgttcggcccgccgcgggccgcgcagncgagagggagaggaggaggaggaggaggaggaggccgcgggccgcacgtggccgatcgagcggctcgggggtcggcggcggcc

SEQ ID NO: 5529 - DNA, 414 bp, Zea mays
atggttgatggcacagtttgcttgtcgattccgttggtcgtcttccccacagaatcctgccgttgcacttgttgctcttgcaaagcatccaaatcaacgacttcagatggaggagatttgtccgcagaggtcatattgttgaatgaatttattttgctgataatttcaaccagattctgcttatctggtatgggaggaatgctaggcactttaccgacgctagaaccatgcaagtgcgcaatcactgtaattagattgacaatatcctgcgtcctatttgctgcattttcttggtttccaggtagcagcaactgcgaagaacatctgctggcttgggtttttcttcttccgccggttgtggccagaaagcctacgccggcagctcctcttaccctcgtcaactccgcgagtggg

SEQ ID NO: 5530 - DNA, 681 bp, Zea mays
atggggcgcggcaagatcgagatcaagcggatcgagaacgccaccaaccgccaggtgacctactccaagcgccggacggggatcatgaagaaggcgcgcgagctcaccgtgctctgcgacgcccaggtcgccatcatcatgttctcctccaccggcaagtaccacgagttctgcagccccggaaccgacatcaagaccatctttgaccggtaccagcaggccatcgggaccagcctatggatcgagcagtatgagaatatgcagcgcacgctgagccatctcaaggacatcaatcgtggtctgcgcacagagattaggcaaaggatgggcgaggatctggacagtctggacttcgacgagctgcgcggcctcgagcaaaacgtcgacgcggctctcaaggaggttcgccataggaagtaccatgtgatcagcacgcagactgatacctacaagaaaaaggtgaagcactcgcacgaggcgtacaagaacctgcagcaggagctaggcatgcgggaggacccggcgttcgggtacgtggacaacacgggcgccggcgtcgcctgggacggcgcggcggcggcgctgggcggcgccccgccggacatgtacgccttccgcgtggtgcccagccagcccaacctgcacggcatggcctacggcttccacgacctccgcctgggc

SEQ ID NO: 5531 - DNA, 642 bp, Zea mays
atggggaggtcgccgtgctgcgagaaggggcacaccaacaagggcgcgtggaccaaggaggaggacgagcggctggtggcgtacatccggtcgcacggggaagggtgctggcggtcgctgcccagcgcggcgggtctgctgcgctgcggcaagagctgcaggctgcggtggatgaactacctccggccggacctcaagcgcgggaacttcaccgacgacgaggacgagctcatcatccgcctgcacgccctcctcggcaacaagtggtctctgatcgccgggcagctgccgggccggacggacaacgagatcaagaactactggaacacgcacatcaaacgcaagctcctggcccgcggcatcgacccgcacgcgcaccaccgcccgcaggcgctgcaccacgtggcagcagcagccctcgtcccggcccccgccgcgaagccgaagccgaagccggcggagtcgtccgacgacggcgggcgcagcagctgcagctgcagcggcagcggcagcagcgcgggggagccgcggtgccccgacctcaacctcgacctgtccgttggtccgccggacgcgcccacctcgccgccgccgccgtgcctgtgccaccgcgcctgggaagcgtgcggctgccaggcaggc

SEQ ID NO: 5532 - DNA, 534 bp, Zea mays
atggccactgccgacggcgagccccagcccgtggccaccgaccccgcccaggtccaggctccggcaccggcaccggcaccctacccttccccggccaagcgcaagcccgaggcggatgtggaagccgacgccaaccttgcgccccctaaagccgcgcgtcccgacgtcgacgaggaggccgccgctgtggccgaggctgccagggccagtgctcgcgcggctgacaagggtaagggcaagatggtagtcgaggaggaggaggaggaggaggaggaggaggaagacgacagcgaggagagcagcgacgacgacgagggcggcggcggcggcagcagcgatgacgacgagctcgttgaagacccgatggccgaggtagacctcagcaacatcctcccctcgcggacccgccgccgcgcccccccgcagcccggggcgtacctcgtcactccggaggaggctgccgcggaggacgacgacgacgacgctgacgtggttcctgaggaggatgagggagcggagggagaggagagcgat

SEQ ID NO: 5533 - DNA, 417 bp, Zea mays
atgaagggcaaggccaacgcctccaagaaggatgaggccaggctccgggccggcggcggcggcgccggaaagcgcaagaaggccgccgcgagcggcaagcccaagcgccctccctccgccttcttcgtcttcatgtctgaattcaggcaggagtaccaggcgcagcaccctggcaacaagagcgttgcggccgtgagcaaggcagcaggggaaaagtggcgctctatgtcagagcaagagaagcaaccctatgtggaccaagctgggcagaagaagcaggactatgagaagactaaggcaaatattgagaaggagagcacaagctcaaagaaggctaagactgatgacgacgatggctcgaagtccgaggtcgatgatgaggatggcggtagtgacgaggataacgacgacgacgag

SEQ ID NO: 5534 - DNA, 600 bp, Zea mays
atgagcatcgcgttcctggacccgggcaacctcgagggcgacctccaggcgggcgccgtcgccggggacacgctgctgtggctgctcatgtgggccaccgccatgggcctcctcgtgcagctcctcgccgcgcgcctcggcgtcgccacaggccgtcacctcgccgagctctgccgcgacgagtaccctgactgggcgcgccgcgcgctctggctcatggccgaggtcgccatggtcggcgcggacatccaggaggtcatcggcagcgccatcgccatcaagatcctcagccgcgggtacctgccgctctgggccggcgtcgtcatcaccgccttggattgctttatttttctttcgctcgaaaactatggggtgaggaaactagaagctgtatttgcacttctaattacaactatggctgtctcatttgcatggatgttcacagacactaaacccacggggaaagccttatggttggggtttggggtcaagagtgagctcagggggagaatggacaggggtggggttgggggggggccgcccgagggccgacggtggtttcgtgcccggcacgattgtgttcacggaggccggttagct

SEQ ID NO: 5535 - DNA, 936 bp, Zea mays
atgaagtacgccgaggccaaggcgctccgggtgggcaagggcggcgcgctcgagtgcgcagtgtgcctcagcgagttcgaggacgaggagcggctcaggctcttgcccaagtgcagccacgccttccacccggaatgcatcggcgagtggctcgccagccacgtgacctgccccgtctgccgctgcaacctcgaccctaacaaggataccagcagcgatgaacagcggcccgacagtttcccgccgatcccagtggcgagcagcatctcgagcgaaaccgcggtgtcgtctgggcatggaccgctacctgtggccgtggtgatcgatgtgatcaccgaggaggaggaagaggcgcggcggcaggaggcgctggagctgcagcagatagggacccagcggcgcgccatgcggtcgcggtcggggcgcaagccggtcccgacgcagctcgcccggtcgcactctacgggacactccctcgccgtccggctcgaccgcgacctggagcggttcacgctgcggctgccggagcacgtgcgcagggagatggtcgccgcgggcgagcagagcatgcgactgcgtcgcgggcgaagagccggggaaggaagcagccgaggcggccgaagcgcccccctcggccgggcgagcagatggcagtcgcttctcgcggggaccttctccgggaagctgtccttcttttcggcgtccaggataacggtcagctcggccgagctgggagaggtgtcgtcctcgtcgtccacgagggcgagagggaagcgcgtggccgccgttgatgccgccgacgctcttgctagtgctaagggcagcgtccgccttgaccgcatcggaggcggcggcgtgtccggcgctgcgtcccgctcccgcgaggtggcggcagcggcggacgaggagaagtcagctacgcaacaggttcgcacg

SEQ ID NO: 5536 - DNA, 279 bp, Zea mays
atggccgcgccggcgggggcgagcacgtaccgcgtggcgccgccgtacccgtacgggtacgtggcggcgtaccagcagcagcccccgccccccgccagctactacccgtacccgtcgtactacggcaatggcgacggcgtgggcctcgccaaccccgcccaccactacccgcagccgcagctggcgtacccgccgtacccgtaccgcttcgacgtggcgccgccgccgccgccgccgcagctcttcagcgacgagaaccccaacgcctgctccgtgatg

SEQ ID NO: 5537 - DNA, 123 bp, Zea mays
atgagcgcgccttgtatgttcctgatggcggggaaagtggactgcaggaagcttccgttgtatgtctccaagaaaggctcattcccgactgcaacatacctgatgctgacgccgtcgttgagg

SEQ ID NO: 5538 - DNA, 693 bp, Zea mays
atggcgagcagcgcggggaaccgcttcctgaggcagctgagcgcgagcaacggcgacgaagcggtctgcggcggcctgcagatggaccagcaggagtacggcggcgccggcgtggggaggaggggatcccggcggtggtcgaagaagcgggccgccgccgccgccgccgcgaggggctacggcgccggcagcgggaatggcgtgaagcagccggcctctgccgcggggaagcgggtgatggtggtggtggacgagagctcgggagccaaccacgccatgatgtgggcgctcacccacgtcgccgacaagggggacttcctcacgctgctccacgtcctgccgcgctccggcagcggcaggggcgaggaggcctcctccctcgccaactcgctcggcacgctctgcaaggcctccaggccagaggtggaggtcgaagcgcttgtgatccaagggcccaagctgggcaccgtgctcagccaggtgaagaagctggaggcctccgtgctggtgctcagccagtgcaggccatctccctgctggttaagctgcttcctgcggagcagcggcgaggagtttgtggagcagtgcatcaaccaggcggagtgcctgacgctggcggtgaggaagcagagcaagggcgtcggtgggtacctcatcagcacccggtggcagaagaacttctggctcctggcc

SEQ ID NO: 5539 - DNA, 465 bp, Zea mays
atgcagatcttcgtgaagaccctgacggggaagaccatcacgctggaggtggagtcctcggacaccatcgacaacgtgaaggccaagatccaggacaaggagggcatcccgccggaccagcagcgcctcatcttcgccggcaaacagctcgaggatggccgcaccctcgccgactacaacatccagaaggagtcgacgctgcacctggtgctccgcctcaggggaggcgccaagaagcgcaagaagaagacgtacaccaagcccaagaagatcaagcacaagcacaagaaggtgaagctggccgtgctccagttctacaaggttgacgacgccaccggcaaggtcacccgcctccgcaaggagtgccccaacgccgagtgcggcgcgggggtcttcatggccaaccacttcgaccgccactactgcggtaagtgtggcctcacctacgtctacaaccagcaggcg

SEQ ID NO: 5540 - DNA, 384 bp, Zea mays
atggtggttaatctgaaactaagagaagatgttatagtagagaagtgccttggcagaaggatttgcggccaatgtggaaagaacttcaatttggcctgcattgatgttaagggtgaaaatggactcccaccaatctacatggcaccactgttgcccccaaacaactgcatgtcgaagcttattacccgagctgatgataccgaagaggtggtcagaaatcggcttcagatatataatgacatgagtcaacctgtggaaggtttctaccgagagcaggggaagctcttggaatttgacttgcctggtgggatccctgaatcttggccaaagctgctccaggttctaaacctcgaggaccaagaggagttgaggttggctgcagcg

SEQ ID NO: 5541 - DNA, 495 bp, Zea mays
atgtcgtcggtgttcagcggcgatgagacggcccccttcttcggcttcctcggcgccgccgccgccctcgtcttctcatgcatgggcgccgcgtacgggaccgcgaagagcggcgtcggcgtggcgtcgatgggtgtgatgcggccggagctcgtcatgaagtccatcgtgcccgtggtcatggctggtgtgctcggtatctacgggctcatcatcgccgtcatcatcagcacggggatcaaccccaaggccaagccctactacctctttgatggctacgcccacctttcgtccgggcttgcctgtggtctcgctgggcttgcagctggcatggccatcggcattgtcggtgatgctggagtcagggcaaatgcgcaacagccaaagcttttcgttggcatgatcctcatcctcattttcgcagaagcgcttgctctctatggtctaattgttggaattatcctttcgtctcgcgctggtcaatcccgggcggat

SEQ ID NO: 5542 - DNA, 534 bp, Zea mays
atgctcatttccgaacaattcaatgtctcgttacaagcaagcatgctcacacataggcactcaacttgcgtagagagttgggcgcagagaatccccaagcaaacaaacagggtagagggagaggagaggagaggagaggagaggttgggtctgggacaccatggctccgatgaagctgtacggggcggtgatgtcgtggaacgtgacgaggtgcgcaacggcgctggaggaggctggctccgactactagatcgtgcccatcaacttcgtcaccgtcgagcacaagagccccgagcacctcctccgcaacccgtttggccaggttccagatctgcaggatggcgacttgaacctcttccaatcccgagctatcgtgccgcccgcttgctctctgtaaccaccaaatacctgctgagggaacgtaacactcaacgaggctacaaaggtctgagtcattgttatcccttgtttctccccacctcactgatcttaagacggtcactccgttactggttaaccacatcgagtatacaa

SEQ ID NO: 5543 - DNA, 1350 bp, Zea mays
atgaaagtcccggtgcttctcctcctggtctccctgtgcttctcgctcgcgctcgcgtggcaaacggacacggaatcgggctcaggcaggccgtaccactacggcgaggagagtttccggcactggacgcgctcccggcagggccggttcagggtgctggaacggttcacccacgagctgctggaggacgccgtcggcaactaccgcgtcgccgagctggaggccgcgccgcgcgcgttcctgcagcccagccactacgatgccgacgaggtgatgttcgtgaaggaaggcgagggcgtcatcgtgctgctccgcggcgggaagagggagtcgttctgcgtcagggagggcgacgtcatggtcatccccgcgggcgccgtcgtgtactcggccaacacgcaccagtcggagtggttccgcgtcgtcatgctcctcagccccgtcgtctccacgtctggacgcttcgaggagttcttccccatcggaggcgagagccccgagtccttcctcagcgtcttcagcgacgacgttatccaggcgtcgttcaacactcgccgggaggagtgggagaaagtgttcgagaagcagagcaagggggagatcacgacggcgtccgaggaacagatccgggagctgagcaggtcctgctcacgtggtggccgcagcagccgcagcgagggtggcgactcgggttcttcttcttccaagtgggagatcaagccgtccagcctcacggacaagaagccgacccattccaacagccacggcaggcactacgagatcaccggcgacgagtgcccgcacctccggctgctcgacatggacgtcggcctggcaaacatcgcccgcggttctatgatggcgccgagctacaacacccgcgccaacaagatagctatcgtcctcaagggccagggctacttcgagatggcgtgcccgcacgtctccggcggccggtcgtcgccgcgccgggagcgtgggcacggccgagaggaagaggaggagcgggaagaggagcaaggcggtggcggtgggcaaaagtcgaggagctacaggcaggtgaaatcccgcatcagagagggctccgtcatcgtgatcccggcggggcacccgaccgcgctggtcgccggcgaagacaagaacctcgccgtcctctgcttcgaagtgaacgccagcttcgacgataaggtgttcctcgcgggcacgaacagcgcgcttcagaagatggataggccggcgaagctgctggcgttcggggcggacgaggagcagcaggtggaccgtgtcataggagcacagaaggacgccgtcttcctgcgcgggccccagagccacagggtctcgtcggtg

SEQ ID NO: 5544 - DNA, 474 bp, Zea mays
atggacaacatggacaacgacaccaagctgctgcatgacaggtactatgcccgaggtgacgatgtcatgctcccggaggttccatatgatcagttccgggctgggtcgcagttctttgtgctcacgagaaggcacgccatcatggtcgtgagggatatgcgactttggaagaagttcaagttgccctgtctgatcgagcgcagggattcatgctacccggaggagcattacttccccacactgctggatatgcaggatcctgagggttgtactaagtatacccttacaagggtaaattggacggattcagttgcaggccacccacacatgtatgagcctggagaggtatccgcaagcttgatcagggagctgaggaagtcgaacacgacacacccttacatgttcgcccgcaagttttctcctgagtgccttgagccgctgatggagattgtggactcggttatcctacgtgac

SEQ ID NO: 5545 - DNA, 720 bp, Zea mays
atggggaggggccgggtcgagctcaagcggatcgagaacaagatcaaccgccaggtcaccttcgccaagcgccgcaacggcctgctcaagaaggcgtacgagctctcggtgctctgcgacgccgaggtcgcgctcatcatcttctccaaccgcggcaagctctacgagttctccagcacgcagagcatgccaaaaacacttgaaaagtaccaaaaatgcagttttgcagggcctgaaacagcactccagaatagagagaatgagcaactgaaaagtagccgcaatgagtacctcaaactgaaggcacgtgttgataatttacagcggactcaaaggaacttgcttggtgaagatcttgagtcattaggcataaaagagctggagcacctggagaagcagctcgattcgtccttgaagcacataagatctacaaggacacaacacatggttgatcaactgacagaacttcagaaaaaagaacaaatgttttgtgaagcaaataagtgtcttcgaagaagactggaggagagcaaccaggttatatggcagcatgcgtgggagcaaagcgagcggcattctgaagtgcagccgcagcagctcaatggcaataacttcttccatcccctcgatggtgctggtgaacccacccttcagatagggtatccttcagaggcactgactagctcatgcatgaccaccttcctgcccccgtggttgcca

SEQ ID NO: 5546 - DNA, 1143 bp, Zea mays
atggacctagagcccggcaccatggactccgtgcgctccggtccctacggccacatcttccgccccgacaacttcgtcttcggtcagtccggggccgggaacaactgggccaagggccactacaccgagggagccgagctcatcgactccgtgctcgacgtggtgcgaaaggaggccgagaactgcgactgcctgcaaggcttccaggtctgccactctctcggcggcggcaccggctccggcatgggcacgctgctcatctccaagatccgcgaggagtaccccgaccgtatgatgctcaccttctccgtgttcccgtcgcccaaggtctccgacaccgtggtggagccctacaacgcgacgctgtccgtccaccaactggtggagaacgccgacgagtgcatggtgctcgacaacgaggcgctctacgacatctgcttccgcacgctcaagctcaccacacccagcttcggcgacctcaaccacctcatctccgccaccatgagcggcgtcacctgctgcctccgcttcccggggcagctcaactcggacctccgcaagctggccgtcaacctgatcccgttcccgcgcctgcacttcttcatggtggggttcgcgccgctcacctccaggggctcccagcagtaccgcgccctgacggtgccggagcttacccagcagatgtgggacgccaagaacatgatgtgcgccgcggacccgcgccacggccggtacctgacggcgtccgccatgttccgcggcaagatgagcaccaaggaggtggacgagcagatgctgaacgtgcagaacaagaactcctcctacttcgtggagtggatccccaacaacgtcaagtcgacggtgtgcgacatcccgcccacggggctgaagatggcgtccaccttcatcggcaactccacctccatccaggagatgttccggcgcgtgagcgagcagttcaccgccatgttccgcaggaaggccttcttgcactggtacacgggggagggcatggacgagatggagttcaccgaggccgagagcaacatgaacgacctcgtgtccgagtaccagcagtaccaggacgccaccgccgacgaggagggcgagtacgaggacgaggaggagggagatctccaggac

SEQ ID NO: 5547 - DNA, 1041 bp, Zea mays
atggacaccggcagcgaccttgtctggacgcagtgcacgccgtgccccgtctgcttcgaccagccgttcccactgttcgacccttccgtgtccagcaccttcagggccgtcgcctgccccgaccccatctgccggccgagctccggcttgagcgtttccgcgtgtgccctgaaaactttccggtgcttctacctctgctcttacggcgacaagtccataacggcgggttacatcttcaaggacactttcaccttcatgtcgcccaacggcgagggcgcgccgccggtcgccgtgtcggggctcgccttcggctgcggcgactacaacaccggcgtgtttgcttcgaacgagtccggcatcgctggcttcggccgcgggcccctgtcgttgccgtcgcagctcagggtcggcaggttctcgtactgcctcacatcgcacgacgagaccgagagcaacaagaccagcgcggtgttcctgggcacgccgccgaatggtctccgagcgcacagctcggggccgttccgatccactccgatcatacacagcccttcgttccctaccttctactacctctctctcgagggcatcaccgtcggcaagacgcggctgccggtcgactcgtcggtgttcgcgctcaagaaggacgggtcgggtgggacggtgatcgactccggcacgggcgtcaccacctttccggcggccgtgtttgagcaactcaagaacgagttcgtggcgcagcttccgctgccccgctacgacaacacctcagaggtcggcaacttgttgtgcttccagcggccgaaaggtgggaagcaggtgcccgtgccgaagctgatcttccacctggcgagcgcggacatggatttgccccgggagaactacatcccggaggacacggacagcggggtgatgtgcctgatgatcaacggcgcggaggtcgacatggtgctcataggcaacttccagcagcagaacatgcacatcgtctacgacgtggagaacagcaagctgctcttcgcatctgcgcagtgcgacaagatg

SEQ ID NO: 5548 - DNA, 408 bp, Zea mays
atggctcgcttctgggcagcctacgtcgacgacaagttctacaaggagtggaaccggctgttctggtcgacgacggcggagaaggcggcggaggcgctcggcgtcgtcgtccccgtggtggagacgctggagcaggcgttcagggagtgctccaaagggaaacccttcttcggcggcgacgccgtcgggctcgtggacatcgcgctcgggagcttcgtggtgtggatcagggtggtggacgaggcggccggcgtaaagcttctggacgaggccaagttcccggccttgacggcgtgggcggagcgcttcttggcggtggacgccgtgaaggaggtgatgccggacgccggaaggctgttggagcactacaaggggtttctggctaaacggtctccacctgctggttac

SEQ ID NO: 5549 - DNA, 501 bp, Zea mays
atggagtacggtcagcaggggcagcacggccacggcgccacgggccatgtcgaccagtacggcaacccagtcggcggcgtcgagcacggcaccggcggcatgaggcacggcacgggaaccggcggcatgggccagctgggtgagcacggcggcgctggcatgggtggcgggcagttccagcctgcgagggaggagcacaagaccggcggcatcctgcatcgctccggcagctccagctccagctcgtcggaggacgacggcatgggcggaaggaggaagaagggaatcaaggagaagatcaaggagaagctgcccggaggccacaaggacgaccagcacgccacggcgacgaccggcggcgcctacgggcagcagggacacaccggcagcgcctacgggcagcagggacacaccggcggcgcctacgccaccggcaccgagggcaccggcgagaagaaaggcattatggacaagatcaaagagaagctgcccggacagcac

SEQ ID NO: 5550 - DNA, 687 bp, Zea mays
atggcggtttctttcgcaaacctcaactccgaggcagggcttaaaaagcttgatgagtaccttctcactcgcagctacatcactggctaccaagcttccaaggatgacttggctgtctacacttcgttttcggctgctccctcgtccaagtatatcaacgtagcaaggtggtttaaccacattgatgcgctcgtgaggctgagcggaattactgcagagggccaaggtgtgaaggttgaatcctcagcagttccttcagccccaactccagatgttgctgaagcacaggccccagttgctgaggaggacgacgacgatgatgttgacctttttggtgaggagaccgaagatgagaagaaggctgctgaagagcgtgctgcagctgccaaggcttctggcaagaagaaagaatctgggaagtcatcagttttacttgatgtgaagccatgggacgatgagactgacatggccaagctcgaggaagctgttaggagtgtccagatggaagggctgctctggggcgcatccaagcttgtcccagttggatatggtatcaagaagctgcaaatcatgatgaccatcgtcgacgaccttgtctctgtcgacactctcattgaggactatctgtgcgctgagccagtgaacgagtacgtgcagagctgcgacatagttgccttcaacaagatc

SEQ ID NO: 5551 - DNA, 786 bp, Zea mays
atggccatggcggccgtgggcgtgggcggcgcagtggcgttcctcctcccgcagcgccgccagggcgccgtcccctggagcggcgggcggcggcgggcgcccgtggcggtgcgcgcgtcgtacgaggccggggtgggcgtgatggcgaccaaggtggggatgatgacctacttcgatccggagacggggaagccggtgccggtgaccgtggtcgggttccgggagggcggcaacgtggtgacgcaggtgaagacggccgccacggacgggtacgacgccgtccaggtcgggtaccacggcgtgcgcgaggacaagctcacccgcccggagctgggccacctgggcaaggccggcgccccgccgctgcgccacctgcaggagttccggctcaccgccgtcgacgccttcgagcccggccagcccctcgacttcgccgacctcttcaaggagggcgacctcatcgacgtctccggcaactccatcggcaaggggttccaaggtggcatcaagaggcacaacttcaagcgcgggctgatgacgcacggttccaagagccaccggcagctgggttccatcggagccgggacgacgccgggccgcgtgtacaaggggaagaagatgcccgggaggatgggaggaaccaagaccaagatcaggaagctcaagatcgtcaagatcgacaacaacctccgggtgctcatgatcaagggggccgtgccagggaagcccgggaacctcctccgcataacgccggccaagatcgtcggcaagaacatccccaagaac

SEQ ID NO: 5552 - DNA, 729 bp, Zea mays
atggacggcgaggacctcagggacttcgccgccggcagcagatacgagcccacagctgccgccgttttctcgcaggtcgtcgatctcggttccgaagtcgcgtcaccgcgccaatgcgtgttggccgctctacagaagctgtccgtcgaccacggagtgcccccggcttcagatgcctgggtcgcgaagcacatcgtggagccggcgttgcagcagcttcttcctgccgatcagcctgggcagcagccggcctcccgcgatgacctgttccagcagctgaagaagctgctgggcgccgtcgctgatcgactccaggagcagcctgtgatcgtcgcgcacaccgagaaccactatgacgggagtggcgtcaagaggctgctggccaacaaattcgagttggacaagctgctggattctgtctggaaaaatttggcagcagaagataagaacaaggcgtccaaggggtgcctcataaccgcgcttgacaagatggccgatgctgcaagccttccatattacagtgctgtgaaagaggtggatgctgtcgtggaagagtcgatcaagacagcgggcgtcgaagaaggaaaggcagtggatgaagcggagttcaagaagtcgctcacagaaatccttagggctatcatgctgaggctgaacgacagccccgtcttcgtctctaccgacgtcgtcgtgcacgagcctttgtccgggacatcatcgtcggtgaac

SEQ ID NO: 5553 - DNA, 789 bp, Zea mays
atgagggtggtggagcgcgtgcagaagaagaccggccgcaaggtggagttgctgtcgccgatcccgccgccaacgccgccggaggagaagaaggcagaggaggagcccgagccgccaaagccggaggagaagaaggagccgccggtgatcgccgtggtgctgaaggtgcacatgcactgcgaggcctgcgcccaggggatcaggaagaggatcctcaagatgaaaggcgtgcaatctgcagagccagacctcaaggcgtcggaggtggcagtgaagggcgtgttcgaggagtccaagctggcggagtacgtgtacaagcgcaccggcaagcacgcggccgtcgtcaagtccgagccggtcccggcgccaccgccggagagcggcgccggcgacaacacgggggccaaggaggaggagaaggggcaggaggaggagaaggagaaggaaggaggaggcgatggcggtggcgaggagaagaagaaggaagggggcaaggaggaagagaagaaggacggcgagaagcaggaggaggagaaggagggcggcggtggcggcgagaaggtggaggaaaaggagggagataaagacgctgccgctgccgccgccgccagcatgtacatgcactacccgaggttcccgttcccgggaggctactacgcgccgcctccggggtacgtctaccagccggtgtacccggcgccggcgtacgcggcgtacgcgccgccgcaccaccagcccatggcgccgcagatcttcagcgacgagaaccccaacgcatgctccgtcatg

SEQ ID NO: 5554 - DNA, 1440 bp, Zea mays
atgcgtgtaatggtttctactgtgatgcattttctcctaacaaaccttacaagcccacaatgtggactgaagcttggagtggctggttcacagaatttggtgggaccatccgccaacgaccggttgaagatctcgcatttgctgttgctcgatttgtacaaaagggtggctcttttatcaattactacatgtatcatggaggaacaaattttggacgcactgctggggggtcccttcatcacaacaagctatgattatgatgctccaattgatgaatatggacttattagagaaccaaagcacagtcatcttaaagaactccacagagctgttaagttatgtgaacaggctttggtttctgttgaccccacaattactacccttggaactatgcaagaggcccatgtcttccgatctccatctggttgtgcagctttccttgcaaactacaattctaactcccatgcaaaagttgtgttcaacaatgagcaatacagcctcccaccttggtcaattagcatccttcctgattgcaagaatgtagtttttaacagtgccacagttggtgttcagacatctcagatgcaaatgtggggagatggtgccacatcgatgatgtgggagaggtacgatgaggaggttgattctctggcagctgctccattgctcaccacaactggtttgcttgagcagcttaacgtcaccagagacagcagtgattatctgtggtacattaccagtgttgacataagcccatctgaaaactttctacaaggtggtggcaagcctccgtctctgagtgttcagtctgctggtcacgccttgcatgtctttgtcaacggacaacttcaaggttcttcgtatggtaccagggaggatcgaagaattaaatataatggcaatgttaaccttcgagctggtactaacaaaatcgcactactgagtgttgcttgcggattgccgaatgttggagtgcattatgagacgtggaacaccggcgtcggtggtcctgtcgtgcttcatggattgaatgaaggttcgcgagaccttacttggcagacctggtcctatcaggttggcctgaaaggcgagcagatgaatctgaactccgtagaaggctcaggctcagttgaatggatgcaagggtcactgatagctcagaagcaacagccgttggcctggtataaggcttacttcgagactcccagcggggacgagccattggctttggatatgggcagcatgggcaagggacaggtctggataaacggacaaagcattggacgctactggacagcgtatgcagacggggactgcaaagggtgcagctacaccggggacttcccgggcacccaagtgccaagcaggctgcggccaaccccacccagcgttggtaccatgtgccaaggtcctggctgcagcccagcagaaacctactgg

SEQ ID NO: 5555 - DNA, 426 bp, Zea mays
atggcccgcctcggcgccggcgccgtgttggcgctcctagtggcggtcgcggcggtggccgcgttcctcgcggtgccggcctcggcgaagtccggggagctgagcgcgatggggttgctggcggcgaagggcggcagcggcgcgggcccgcagaagtgctcgggcgcggtgggcgagtgcgacgtggacgaggcggaggagctcgggctgagcggcggcggcctcggctccgacgacgcggtgcggcggacgctggcgcagcggaagccgaccaaccggtacatcagctacgcggcgctgcgcgcggaccaggtgccgtgcaacaagcgcggccggtcctactacagcaactgcgaggcgcagaaggccgccaacccctaccgccgcggctgctccgccatcacgcgctgcgcccgcaacatgaac

SEQ ID NO: 5556 - DNA, 1173 bp, Zea mays
atgcgccgctgccttgtcgaccgcttcggcttcgacgaggccgacatccgggtcctcaccgacgccgaccgatccgcgccgcagcccacgggggctaacatccgccgcgccctcgcccgcctcgtcggggatgcccgccccggggacttcctcttcttccactacagcggccacggcacgcgcctgccagccgagacggggcagcacgacgacaccggctacgacgagtgcatcgtgccctgcgacatgaacctcatcacagatcaggatttcagggaactcgtgcagaaggtccctgaaggttgcctattcaccatcgtctctgactcatgccatagtggtggcctgctggacagtgctaaggagcagataggtaatagcaccaagcagaataagacccagtcccgtgaacctgatgagcctcgtcattctggttctggcagcggcttccggtcatttctcaaagagactgtccgcgatgtgttcgagtctgaggggattcacatccctcatagtcgtcgccatggggatgatgaccaggacgacggttacgcacagccaactggaaatggccgcaccaaaaaccgctccctgccactctcgaccctgatagagatgctcaaggaacaaactggaaaggatgacattgatgtgggttctatccggatgacgctgttcaacatctttggtgatgatgccagcccaaagattaagaagttcatgaaggtcatgctcggaaagttccaccagggccagtcaggtgagcaaggcagtggtggtggtggtgtctttggcatggttggtgcccttgctcaggagttcttgaaggctaagcttgaagggaaggaggaagaggctttcaaacctgcattagagcaagaggttcacagtgttgacgaggtgtacgccgggagtaaggcctgggcaccaaacaatggcattctgatcagtgggtgccagactaaccaaacatcagcggatgcaactacaccgcagggtgtctcctttggtgctctgagcaatgctatccaaaccattcttgcagacaagcacgggaaggtgacgaataaggatctcgtgatgaaagcacgtgagctgctgtccaagcaagggtacactcaacagcctggactatactgcagcgatgagcatgttcatgtcgctttcatatgc

SEQ ID NO: 5557 - DNA, 1350 bp, Zea mays
atgagggagtgcatctccgtccacatcgggcaggccggcatccaagtcggcaacgcgtgctgggaactttactgcctcgagcacggcatccagcctgatggccaagtgcctggagataagaccgcgggacatcacgatgatgccttcagcaccttcttcagccagactggtgctgggaagcacgttccccgtgcaatcttcgttgatctagaacccactgtgatcgatgaggtgcgcactggcacgtaccgccagctcttccaccctgagcagctcatcagtggcaaggaggatgccgctaacaatttcgcccgtggccactacacaattggcaaggagattgttgatctgtgccttgaccgtatccgcaagcttgctgacaactgcaccggcctccagggcttcctggtcttcaatgccgttggtggtggcactggctctggccttggttctctcctccttgagcgcctgtctgtggagtacggcaagaaatccaagctgggcttcactgtgtacccatctccccaggtgtcaacctctgttgtggagccttacaacagcgtgctctccactcactcactcctggagcacactgatgtctccatcctgctcgacaacgaggccatctatgacatctgcaggcgctccctcgacattgagaggcccaactactccaacttgaatcgccttgtgtctcaggtgatctcatcgctgactgcttctctgaggttcgatggtgccctcaatgtggatgtgaacgagttccagaccaacctggttccttacccgaggatccacttcatgctctcctcctacgcaccggtgatctcttctgcgaaggccttccacgagcagctgtctgtggcggagatcaccagcagcgcgttcgagccggcttccatgatggtcaagtgcgacccacggcacggcaagtacatggcttgctgcctgatgtaccgcggcgacgtggtgcccaaggacgtgaacgccgcggtggccaccatcaagacgaagcgcaccatccagttcgtggactggtgcccgacggggttcaagtgcggcatcaactaccaggcgccgacagtggtgccgggtgccgacctcgccaaggtgcagcgcgcggtgtgcatgatctccaactccaccagcgtcgtcgaggtgttctcccgcatcaacagcaagttcgacctcatgtacgccaagcgcgcgttcgtgcactggtacgtcggcgagggcatggaggagggggagttctccgaggcacgcgaggacctggccgccctggagaaggactacgaggaggtcgccgcagagggcggcagtgatgacggtgacgaggaggaggaatac

SEQ ID NO: 5558 - DNA, 423 bp, Zea mays
atgagccggggtagcctgcaggaggatatccaccttgaggtgggtagccacctggctgagggtacccatattgtggtgggtatgccccaggtggaggaggatatgcccctggaggaggaggatacgcccctgggggaggcgggtatgctcctggttgcggtgggtagccctgcggagggtatccctggtgggggtacccatgaccaccggcaacgccgtgcatcatgttcgagaagagccccttgtcgctctcgtcatgcttgtctttccctcctcccattgaccccgcaagttaccgaacgacgacgcgaactccggcgccctgaagcagcacagatgtgcagccgatctcggccggcgatgttccctgtcggcggcgggtgctggtttggccgttccccttccccccggctggcggatata

SEQ ID NO: 5559 - DNA, 717 bp, Zea mays
atgaaaacaaacgaggttttgtctgaggagatacaagagcgcgatgaagccgctttgaaatatctaaaagatatcaagtggtctagaatcgaggatcctaagggtttcaagctggattttttctttgatacaaacccattcttcaagaattctgtcctgacaaaaacgtaccacatggttgatgaagatgacccaattttggagaaagctattggaactgaaatcgagtggtatcctgggaaaaacctaacacagaagattctaaaaaagaaacctaaaaaaggttcaaagaatacgaagcctatcactaaaaccgaggactgtgagagtttcttcaactttttcaatcccccgcaggtccctgaagatgatgatgacatcgatgaagacactgctgatgagctgcagagtcaaatggagcatgattatgacattgggaccaccataagggataagattatccctcacgcagtttcctggtttactggtgaggctgtgcaaggtgaggattttggtgagttgggcgatgatgatgaagatgatgatgatgaagacgatgacgaagatgatgaggatgaagaagaggatgatgatgaggaagaggatgatgaggaagaaagcaagccagcaaggaagtcaggatctggtcgcagacataaggcgccacagaaggtgtcgcagggaaatgcggaacaaccagcggagtgcaagcagcag

SEQ ID NO: 5560 - DNA, 1035 bp, Zea mays
atgtgggagtgccccgacttctacccggtgagcaagggcggcgcgccgcgcgcggggctcgagacgtccgtgccgcccggcccaagggtgaagcacgtgctcaagaacagcctcgacctccggcggtacgactactacaccgtgggcacgtaccacccgagggccgagcggtacgtgccggacgaccccgccggcgacgagcaccgcctgcgctacgactacggcaacttctacgcgtccaagacgttctacgacccggccaagcggcgccgcatcctgtggggctgggctaacgagtccgactccgccgccgacgatgtggccaaaggctgggctggaatccaggcgattccaaggacggtgtggctggaccccagcgggaagcagctgctgcagtggcctatcgaggaggtggaggcgctgagagaaaagtcggtcactctcaagaacaggttaatcaaggcaggacatcacgtcgaggtgaccgggatacaaacggcacaggctgacgtggaggtgagcttcgaggtgtcgccggcggccctggccggtgccgagacgctggacccggcgctggcctacgacgcggagaagctgtgcggcgtgaagcgcgcggacgtgaggggcggcgtggggccgttcgggctgtgggtgctggcctccgccaaccgcaaggagagaaccgccgtgttcttcagggtgttcaagcccgccgccggcagcgacaagcccgtggtgctcatgtgcaccgaccctaccaagtcgtccctgaacccgaacctgtaccgcccgacatttgcaggatttgtcgacacggacatctcgaacggcaagatatccctgagaagcctgatcgaccggtcggtcgttgagagcttcggagccgggggcaagacctgcatcctctccagggtctacccgtcgctggccatcggcaaggacgctcgcctctacgtgttcaacaacgggagggcgcacgtcaaggtgtcccgtctcaccgcgtgggagatgaagaagccggtcatgaacggggcc

SEQ ID NO: 5561 - DNA, 597 bp, Zea mays
atggtgatgaagcccatgggcatgcccccggccgctgctgccggtggcggcaacggaaacggcggcggcaagaagggtggcggcgggaacgaggtcccggttcagatcaatgggaacgccagcaacggcggcggggcgaagcagaacgggggcggcaaaagcggggccaagaacggcaagggcggcggcggcggcggcggcgtcgttgccccgggcggcgggaaccaggctgggcagggcaagccgaaaggcggcttccccggcggcgccggtctcggcgggccgatgatgggcggcgcgccgccgccgcatgcgggcatgatgatgaggccgccgaacatgatgggcggcgcgggcggttttccccggcatgggccagatgggcggccacccccacatggggtggcggcggcatgccgcaggcaggcgggggcgccgcgcacggcatgccggctggtggcagcatcagcatggccgctggcggaatgcctggggccgggttctttccgcgcggcgttggcggcggcatgccggccggcgcggagatgctgggcatgtcgcagctgcctccgcagcagcagcagcacatggcggcgg

SEQ ID NO: 5562 - DNA, 123 bp, Zea mays
atgccgtcgcactcgtcgcgctcctccgacatgtcgggcagcgggtcccaggcgtcggccccggcgtcgtacgcctcggcggtcttgagcgcgttcttgtgcttgtcgtggccgcccgccacg

SEQ ID NO: 5563 - DNA, 636 bp, Zea mays
atgtatgatttcatggccctcgatagaccttcaactcctaccattgatcgtgggatagcattacataagatgattagacttatcacaatgggtttaggaggagagggctatcttaatttcatgggaaatgagtttggacatcctgaatggatagattttccaagaggtccgcaaagacttccaagtggtaagtttattccagggaataacaacagttatgacaaatgtcgtcgaagatttgacctgggtgatgcagactatcttaggtatcatggtatgcaagagtttgatcaggcaatgcaacatcttgagcaaaaatatgaattcatgacatctgatcaccagtatatttcccggaaacatgaggaggataaggtgattgtgttcgaaaagggagatttggtatttgtgttcaacttccactgcaacaacagctattttgactaccgtattggttgtcgaaagcctggggtgtataaggtggtcttggactccgacgctggactatttggtggatttagcaggatccatcacgcagccgagcacttcaccgccgactgttcgcatgataataggccatattcattctcggtttatacaccaagcagaacatgtgtcgtctatgctccagtggag

SEQ ID NO: 5564 - DNA, 378 bp, Zea mays
atggtgcgcaacgcgaagaaagccgaggcggagatcgcccctctgaagatatcctccctcaagaagatcggaaagggctccaacgtcatcatcatggactcgtacagcgacgtcgccaagactgtggcgaagacgctggacagcgtggggttcaagaactgctgggtcatggccggcggcttttttggccggaaagggtgggcgcagagccgtctcggaacggattcctacaacctatccgtggtcgaagtcgtcacgccgtcacgtgtgatccctgctgtcgcaggcccccccactgggacgaccgctgcacccattgggacggcctcgtcggcgtccagagcgactactcgcaagctttttcccggcggcgtagac

SEQ ID NO: 5565 - DNA, 654 bp, Zea mays
atggtgctgtgggtcttcggctacggctccctcatctggaaccccggcttcgacttcgacgacaaaatcctcggcttcatcaagggctacaagcgcacctttaatctcgcttgcattgaccacagaggcacaccggagcatccggcgaggacctgcacgcttgaaaccgacgacgaggccatatgctggggaattgcatattgtgtcaagggtggtccagaaaaagagctaaaagcaatacagtacttggagagaagagagtgtgagtacgaccagaaaatatccattgatttctacaaggaaggagatcccttgaaaccagctgtgacgggcgtcttagtgttcgtttccactccagatccaattggcaacaagtactatcttggccctgctcctctgcaggatatggcaaggcaaattgctacagccaatggccctactggctataatagggattacctgttctcaatggagaaggcattagccagcattagccacgaagatgattcgatcatagagcttgcaaacgaggtgaggaaggtgctcaacagaacaaaggagaccaagatcactggtgccaatgcttccatgaaatcacatgcccctcttgtgcacctgtccgcgcttccagaaggcaccgttgtggactcgaga

SEQ ID NO: 5566 - DNA, 450 bp, Zea mays
atggcgcccaaggcggagaaaaagccggcggcgaagaagcccgcggaggaggagcccgcgaccgagaaggcggagaaggctccggcagggaagaagccgaaggcggagaaacgcctccccgcgggcaagtccggcgccggcgagggcaagaagggcaagaagaaagccaagaagagcgtggagacctacaagatctacatcttcaaggtgctcaagcaggtgcaccccgacatcggcatctcgtccaaggccatgtccatcatgaattccttcatcaacgacatcttcgagaagctcgccgcggaggccgccaagctcgcccgctacaacaagaagcccaccatcacctcccgcgagatccagacctccgtccgcctcgtcctacccggcgagctcgccaagcacgccgtctctgaaggcacaaaggcggtcaccaagttcacttcgtct

SEQ ID NO: 5567 - DNA, 1338 bp, Zea mays
atggcggtcacgatcacgtgggtgaaggcgaggcagatcttcgacagccgcggcaaccccaccgtcgaggtggacgtgggccttagcgacggcagctacgcgaggggggccgtacccagcggcgcatccactgggatatatgaggccttggagttgagggatggaggatctgattatcttggcaagggtgttcttaaggctgtcagcaatgtaaataacattattggaccagcaattgttggaaaggaccccactgagcaggttgagattgacaacttcatggtccaacagcttgatgggacctccaatgagtggggctggtgcaaacagaagcttggagcaaatgccatccttgcggtttcacttgcggtgtgcaaagctggagctatggtgaagaagattcctctttaccagcacatcgcaaatcttgctggaaacaaaactctggtgctccctgtacctgcctttaacgtgattaatggagggtcacatgctggaaacaagcttgccatgcaggagttcatgatcctcccaactggtgcctcctcgttcaaggaggccatgaagatgggagttgaggtgtaccacaacctgaagagcatcatcaagaagaagtacggtcaggatgcgacaaatgttggggatgaaggtggttttgcacctaacattcaggaaaacaaagaaggccttgaactattgaaggcagccatagaaaaggctggctacactggaaaggtggtcattggaatggatgttgctgcttctgagttcttcggtgagaaagacaagacttatgatcttaatttcaaggaggagaacaacgatggctcaaagaaaatttcaggcgacagcctgaaagacctgtacaagtcctttgtttctgagtaccctatcgagtcgatcgaagacccatttgatcaggacgactggagcacttatgccaaactcactgatgagattggacagaaagtgcagattgtaggagatgatcttctcgttaccaaccccaccagggtcgccaaggccatcaatgagaagacctgcaatgctctcctcttgaaggtgaaccaaatcgggtctgtgaccgagagtatcgaagctgtcaggatgtccaagcgcgccggatggggagtgatggcaagccacaggagtggcgagacagaggacaccttcattgctgacctctcagttggcctgtctacgggccaaatcaagacgggagctccttgccggtctgagcgcctggccaaatacaaccagctgctcaggatcgaggaagagctcggtgatgccgcggtctacgccggagcaaagttcagggcaccagtggagccctac

SEQ ID NO: 5568 - DNA, 549 bp, Zea mays
atgacgtgcagcggccacatgctctgctgcaccgccacgctgaccaggaccttgctcggcgtcctccgccccgcgtcgccgtccgggggcggggacccggagcggaagctcgccccccggacgccggcgagcaggtcgggcagcgtcttgggcctctgcttctgcggctggtggtgccgctgctccgtcccgcgcccgtggaacgacgccgaccgctgggccggggccggggccgccgccgccccctgccgctgcctgccgcccttctcaccgtgcggcggcgccagaggaggcatcgcgagcgccggctggctgcagaggcgggggggctctagacgtcgcggcgatccggccgctggcggtgacggtggacgagagccacgtactcacgttcggtggcggccggacgacgaggcggtcaatgcgaagcggagcatgctgcggggagaggaggctgctgctgctgctgcagtcaccatgcgcgcaggagggtggaggtggagccttgtgatgagttccgcgaggatgcaccaggaccagagaggctac

SEQ ID NO: 5569 - DNA, 768 bp, Zea mays
atggcccactcgaggcggttgagcagctcggtggagttcttgttgtacatgaagaggccgttgtacaggtcgaagctgtcgctgcaggtgttgtccacgaggcggatcagcgtctcgtaccccctggtgtcgacgggcgtggagcgcagctccagcgtggccagcatccgcccgacggtgtgcgtcaggaactgggtctcggcggcgtgcgcgtcgtgctcggcgcaggacatctccaccatccggcacccctcgcgctcgaaggcgccgaggaacgcgtcggcgcgggcgcggcgcgcggggcagtccccgacgcgcacccgctcgaacaccagcggcaggccgtcccacccgtcgcgcgccgactccggcccgaacatggggtgcgtgcagatcacgtcgaagccgggcggcagcgagctcaggagcaggttcctggggaactccttcacggagagcacgtccgcgaagagggtgctgcggcggagccggtgcaggggcagcgaccgcagcacggcctccgcggacaggatggaggtggcgagcagcaccacgtccgggtggcactcgcacaggtcgtgcgggtcggtgaagaaggcggcgcccagcgcggacgccgccgccgagtggtccgtccgcgagtgcgccagcagcgtgtgcccctgccgcgcgaacgtgcgcgccaggaactgcccgaagttgccgaaccccacgatggcgatcttcagccgctgccgctcctccagcggccccgccgcgcgggactcg

SEQ ID NO: 5570 - DNA, 381 bp, Zea mays
atgcgaagctggcgtgcccgctctgccgcaccccggcgcccgacatcaagtccatgcagatccaccacgaggcgcgccaccccaagctccccttcgagccggagaagctcctcaacctgcactcctccgcccccgctgctgccgccgccgccgccgctgccgccgccgctgccgaggccaccacctccaagcccaagcccggcgtccgcggcagcctcaagaagtaagcttgctgggcttggttggctcgcccgcctgcatggggcgcaattcccttcggtttcaatcccatccgccgacccgatctataatcaatcaaaccgccgccctccggcctggcggctgccgcagtcggcctgcggtgtactgttagtctgctgc

SEQ ID NO: 5571 - DNA, 540 bp, Zea mays
atggtaaaatcaacagttgtcgacagcactactggtaaaagcaaggacagcagggtccggacaagttcgggcatgtttcttcaaagaggaagggacaaggttattcgagtaattgaaaagaggattgcagactataccttcatacctgtagatcatggagagggactccaagtactgcattatgaagtcgggcagaagtatgagcctcactttgattattttcttgatgagtttaacaccaagaatggtggtcagaggatggctactcttctgatgtatctatcagatgttgaagaagggggcgagactattttccctgatgcaaatgtgaacgtcagttctttaccatggtacaatgagctttcagagtgtgccaagagaggcctttctgtcaaaccaaagatgggagatgcacttcttttctggagcatgaaaccagatgccaccctggacccattaagtttgcatgggggttgtcctgtgattagaggaaataaatggtcgtcaaccaagtggatgcatatccacgagtacaaagct

SEQ ID NO: 5572 - DNA, 750 bp, Zea mays
atgccgatcaataggatcgccctggggagccaccaggaggtgtaccacccgggcgccctcaaggcggcgttcgctgagttcatctccaccctcatcttcgtcttcgccggccagggctccggcatggccttcagcaagctgaccggcggcggcccgacgaccccggcgggcctgatcgcggcggcggtggcgcacgcgttcgcgctgttcgtggcggtgtcggtgggcgcgaacatctccggcgggcacgtgaacccggccgtgaccttcggcgccttcgtgggcggcaacatcaccctgttccgagggctcctgtactgggtggcgcagctgctggggtccaccgtggcgtgcttcctgctccgcttctcgacgggcgggcaggccacgggcaccttcgggctgacgggcgtgtcggtgtgggaggcgctggtgctggagatcgtgatgaccttcgggctggtgtacacggtgtacgcgacggcggtggacccgaagaagggcagcctgggcaccatcgcccccattgccatcggcttcatcgtgggggccaacatcctggtgggcggcgccttcgacggcgcgtccatgaaccccgccgtgtccttcggccccgccctcgtcagctgggagtggggctaccagtgggtgtactgggtcggccccctcatcggcggcggcctcgccggcgtcatctacgagctgctcttcatctcccacacccacgagcagctcccctccaccgactac

SEQ ID NO: 5573 - DNA, 399 bp, Zea mays
atgtcgtactacggcgaccggcgcgcggagtcgtcgatcgtggaggcgttcacgctgtcgccgctgccgtacccggtgatcctggtgctgctgatggtgacgctgctgctgggcgcctcgtggttcttcacgtacgacgacttcatcgaggaggcgtcgcagcagctgagctgggcgctgctgggcgtgcccatcgcgctcgtcctcctcatccgctggatctcctccgtcgactccttcgagggctacctgggcttctacccgagggagagccgctggaagggccgctacgagcggggccccgccgagggcagctcgccctggggcgtcgccttgctcgtcctcctcctcctcgtgctcgccagcttccactccaccatccacgacatgtgggggccg

SEQ ID NO: 5574 - DNA, 1122 bp, Zea mays
atggcgatgccaccgaagcccggcgacccgccgcagcgctcgccggcacgtagcccaaacctcaatctcccctgcccgctgccgccggtcccgggcggggcgccgccaccgccgcagcagcagccgggcgccgggctgcccccgccgcgcgtgggccaccaccgccgcgccagatctgaggtggccttccgcttcccggacgacctgcccggcggcgggggcggcggcttcgacgagatcggctccgaggacgacctcttctccaccttcatggacatggacaagatcgccggcgccgaccgcgaccgcgccgccgagacctcctcgccgccgcgcccagccaagcaccgccacagcgtctcctttgacggcttcgggatgggggctgccgccggcggcccgggcggccagcaggacggcggtggaggcatgttcggagaggtgatggaggccaagaaggccatgtcttccgagcagctctccgagctcgccgccatcgatcccaagcgcgccaaaagaattattgcaaacaggcaatctgcagcacggtcaaaggaaagaaaagctcgatatataacagaattggagcggaaggttcaaactcttcagacagaggctactactctttcagcacagctgacactattccagagagacacaactggactttcagcagaaaatgctgagctcaagataaggttgcaggccatggagcagcaggcccaactgcgtgacgctctaaatgatgcactgaggcaagaagtggagaggcttaagatagcaacgggcgagatgtcgaagtccaataacgagcatttcaatatgggaatgcagcacgtttcctacagcccttcattcttccagctctcggagcaacacacagtgcagcagcatggaaacattcagctgccgcaccatttccaacagcctccgctgaatgtcccgagccaccagatgctatcccaccccaactccctctcgaacatggtgcagcaagactctcttgggcgtctccaggggctggacattgggaaaggctccatggctgtgaagtcggaggctgaggtcgtggtgaagtcagagggcagctctatatctgcgggtgaaagcaacaccaccttc

SEQ ID NO: 5575 - DNA, 543 bp, Zea mays
atgaccattacaaggatcctaagacgaggtgaacttcgtaacggccttagtgccctcggagacggcgtgcttggcgagctcgccggggaggacgaggcgcaccgaggtctggatctcgcgggaggtgatggtgggcttcttgttgtagcgcgccagcttggcggactcggccgcgagcttctcgaagatgtcgttgatgaaggagttcatgatggacatggccttggaggagatgccgatgtcggggtgcacctgcttcagcaccttgaagatgtagatcttgtaggtctccacggacttcttcgccttctttttccccttcttgccctcgccgccctccttggacttgcccgccgggaggcgcttctcggccttgggcttcttccccgccggagccttctccaccttctctgtcgcgggctcctcctccgcgggcttcttggccgccggcttcttctccgccttgggtgccatctgtgcggcggctgcgggaggtcgggactcgcgagggtgagaggctgcggcgaattgcctaggttggtt

SEQ ID NO: 5576 - DNA, 471 bp, Zea mays
atggccggaggagatgacctgaagctgctgggcctgtgggcgagcccgtacgtgctgcgggtgaagctcgcgctcagcctcaagggcctgagctacgagaacgtggaggaggatctgagggacaagagcgagctcctgctcaagtccaaccccgtgcaccagaaggtccccgtgctgatccacggcggcaagcccatctgcgagtcgcaggtcatcctgcagtacatcgacgaggccttcgccggcaccggcccgtccctcctccccgccgacccctacgagcgcgccgtcgctcgcttctgggccgcctacatcgacgacaagatgctgcccgcctggaaccagtcgacgatgggcaagacggacgaggagaggcccgatgggaacaaccagcccgccgtgacggcggaccacctggagggcccccctgagggcctgtcttggtgcacggaaactccttttcttcgttgg

SEQ ID NO: 5577 - DNA, 1599 bp, Zea mays
atggaccaggtggggcggaagaagtacgtcaagcaggtgacgggccgccacaacgatacggagctccacctcgccgcgcagcgcggggacctcgaggccgtgcgccagatcatcgccgagattgacgcccaaatgaccggcaccggcgaggagtttgacaacgaggtcgccgagatccgcgccgctatagtgaacgaggccaacgagatggaggcgaccgcgctgctcatcgccgccgagaaggggtttcttgacatcgtcgtcgagctgctcaagcactccgacaaggacagcctcaccaggaagaacaagtccggattcgatgctctgcacgtcgctgcaaaagagggccacagagatattgtcaaggtacttctggaccatgatccatcccttgggaaaacgtttggccaatcgaatgtgactcctctcataactgcggcgattagaggccacactgaggtggtgaacctactgctggagcgagtttctgggttggttgagttatcaaaagcgaatggaaagaatgccttgcactttgctgcccggcaggggcatgtggaaatcgtgaaggctttgctagatgctgatacccagcttgctcggaggactgataagaaaggccagattgctctacacatggcagtaaaaggtactaacccggaagttgttcaagcgcttgtgaatgccgatccggcaatagtcatgctacctgacagaaatggcaacttagctctgcatgttgcaaccagaaagaaaagatcagagattgtaaacgtgcttctgcttctcccggatatgaacgtgaatgcgttgactagggaccggaagaccgcattcgacatcgccgagggcctcccactatcagaggagtcccaagaaataaaggagtgcttgtcccgcgctggcgcggtcagagcaaatgagctgaatcagcctcgggatgagctcagaaaaacagttacagagatcaagaaggacgtgcatactcagcttgagcaggcgagaaaaaccaacaagaatgtctacggcatcgcgaaggagctaaggaaactccacagggagggcatcaacaacgcgacgaattcagtcacggtcgtggcggtgctcttcgccacagtggcgttcgccgcaatcttcacggtgcccggcggcaacaccgacgacggcgtagcggtggccgtgcacgcgacatccttcaaggtgttcttcatcttcaacgccgtcgccctcttcacgtcgctagcggtggtggtggtccagataacggtggtcaggggcgagaccaaggcggagaggcgggtggtgggggtcatcaacaagctgatgtggctggcctcggtgtgcacgacggtcgcgttcatatcctcctcgtacatcgtggtggggcggcacttcaagtgggcggcgctcctggtgaccctgatcggcggggtgatcatggccggcgtgctcggcacgatgacgtactacgtggtgaagtccaagcgcgtgcgcaagatcaggaagaaggtgaagtcgacgaggaggagcggctcgaactcgtggcaccacaactcggagctctcggattcggaggtcgaccgcatctacgccata

SEQ ID NO: 5578 - DNA, 1011 bp, Zea mays
atggagccgttcgtgatcgccaccaaccggcagctcagcgtgacgcaccccgtgcacaggctgctgctgccgcactaccgcgacaccatgaacatcaacgccctcgcgcgccagaagctcatcaacgccggcggcatcttcgagatgaccgtcttcccgcgcaagtacgccatcgagatctcctccaaagtctacggcagctggaacttcaccgagcaggccctccccgacgacctcatcaagcgaggcatggccgttccagatccgtcgagcccctacaaggtgcggctgctgatcgaggactacccgtacgcctcggacgggctggccgtgtggcacgccatcgagcagtgggtgacggagtacctggccatctactaccccaacgacggcgtgctgcaggccgacgtggagctgcaggcgtggtggaaggaggcgcgcgaggtcgggcacgccgacctcaaggacgagcactggtggcccaagatgcagacggtgccggagctcgtgaaggcctgcaccaccatcatctggatcgcgtcggcgctacacgctgccgtcaacttcgggcagtacccgtactgcgggtaccacccgaaccggccgtccgtgagccggcggcccatgccggtgccgggctccgacgcgtacaaggagctggagaagaacccggagaagttcttcgtgcgctccatcaccgcccaattccaggccgtcgtcggcatctcgctgctggagatcctgtccagccactcctccgacgaggtgtacctcggccagcgcgacaccaaggagtggacgtcggacgccaaggcgcaggaggcgttcaagcggttcggcgcgcggctgaccgagatcgagaaacgcgtggaggccatgaacaaggacccgcgcttcaagaaccgctacagcgcggcccagttcccctacaccctgctcttccccaacacctccgacaagggcgataacaccggcgtcaccgccaagggcatccccaacagcatttccatc

SEQ ID NO: 5579 - DNA, 306 bp, Zea mays
atgaacgggttcaccaccacgcacgccacgggccgcccggcccgtgcctgccgccccagcagctcggccagcgccggcgggccgtccttggcgatgtggcgcatgaggtcgtccaggtcaggcccggggtcctcgtcgtccatgaactcgaaccggacgcggccccggcccaccggcacgccgtcgccgccggccgatacgcccgcggacgcggtgagcttcgccccgatgctggagagcgaggagaaggtcacaagggggcccttggccgcgatgcgcttggccaggcggaccatcgggttcacg

SEQ ID NO: 5580 - DNA, 387 bp, Zea mays
atgcagaagagtgagatgctgcaggagtccaatatctccaagttcaagtcccaagtgcagagctcgcaggaaaaccatttctctttactacagcgggagactgagaaacttcgcggagatattgataagatgaggagtgaactgaagtatgagatcgacaaggtcaccgcaggacagcgattggatctgaatcttgaaagagggcgcatacgtgatgagcttgccaagcagaatgaggaaaccactgagcttaccacaaagcttgacaaggaaatccactcactgaaggcccagttggaggcagcaaagtacgatgtcatcaagtactgcataggtaccattgtttcgatctcagccgtcggcctcgccgtcctccgcatcgtgatg

SEQ ID NO: 5581 - DNA, 654 bp, Zea mays
atggcggcgacaatggcagtgacgacgatggtgacgaggagcaaggagagctggtcgtcattgcaggtcccggcggtggcattcccttggaagccacgaggtggcaagaccggcggcctcgagttccctcgccgggcgatgttcgccagcgtcggcctcaacgtgtgcccgggcgtcccagcggggcgcgacccgcgggagcccgatcccaaggtcgtccgggcggccgacaactgcgacatcgcgcgccagcttggcgccgccgttcccgggcagcaggccgcctgggaggcggaggaagaggcagcgaagaggaggaagcagaagggcggcggcagcaagaagcagcagcagctgggcgatctgagcctgaggaaggtcagggtcaagatcgccaacccgcacctgcggcgcctggttagcggcgccatcgccggcgccgtgtccaggacgtttgtggcgccgctggagacgatccggacgcacttgatggtcggcagcatcggcgtcgactccatggccggggtgttccagtggatcatgcagaacgaagggtggaccggcctgttccgcggcaacgccgtcaacgtcctgcgcgtcgctccgagcaaggctatcgagcatttcacctatggacacggcccagaaagtccc

SEQ ID NO: 5582 - DNA, 867 bp, Zea mays
atgcctcaactaatcctcaaacgccctgaggttattgtttacggctgtgaagcctccgtccaccatgaggttgaccgcgctgacgtacctcgcctcgtcgctggccaggtagagcaccgcctgggcgacgtcctcgggcatggcgtcgacgcccttgaggttggcctcgccgccgacaaaggccaggaagtccttgagcgcgtcatctgcgcgcgcgccctggggcaggtgcggcatcgacagcgccgtgggcacggcatagggggacacgcagttgacgcgcaccccgtggcggccgagctccgcggcgacgctcttggtgagcccgaccacggcgtgcttggacgccgtgtagacgtgcgggcccgtcccgccgatggcgctggccacgctggccagcgacacgatggagccccgcttccgcgggatcatagcgcgcgccgcgtgcttcatccccaggaacacgccgtgcacgttgacgtcgagcaccctgcgcgcctccgcgaagtccacgttgcggatgtccgtcaccttggtgcccgtcacgccggcgttgttcaccatcacgtccagcgcgccgaaccgctccgccgcagcgtccacggcgcggctcacgtcctcctccgacgtcacgtcgcagtggacgaacatggcgccctgcgcgtcacctcccagggcgtcgcgcagctgctgcccagcctcatcctggatgtccgcgatgcagaccttggcgccgtgctccatgaagaggcgaacgatggcctcaccgatgccggtggcgccaccagtgacgagggccaccttcccttccagccgcttactcgaggaggagaaggacggcgaggagcccgcggcggccatcgtctt

SEQ ID NO: 5583 - DNA, 558 bp, Zea mays
atgaagatgttcgccaacttccaccgccgcgacttcaacttcagcttcctgggcgagcgggagttctacgagcggcggcgcttcttcgaggagttcacggagctgaaggcggagccggcgagcgcgttcctggacgcgaggagcccgcggtggggcgggctcggcaagttcctgcgcgccaagtacctgtcgctggtgcacgcgcggatggagacggccttcttcgggcggctggagcagcgcggcatcgtgagcgccgggcccgggttcccggagagctcgtggttcgcggacttcgcggagatggcgcgccgcgtgtggctgctgcactgcctcttcttcgcgttcgacggcggcgccgaggaggacggcgcgtccatcttccaggtgcgcacgggggcgcgcttctcggaggtgtacatggagagcgccagcgacgggagcgccggcgacgacgccgaggaccgcgtggtcggcttcaccgttctgccggggttcagagtcgggcggacactgatccagtgccgcgtctacctgtccaaaccggggcggcggccg

SEQ ID NO: 5584 - DNA, 558 bp, Zea mays
atggcgcccaagaggagcagcgaggagcgcgcggcggcggagcaggagcagccgaggctccgcggcgtgcggaagcggccgtggggcaggtacgcggcggagatccgggaccccgtgaggaaggcgcgcgtgtggctcggcaccttcgacacgcccgagcaggccgctcgtgcctacgacgccgccgcgcgcaggctccgcgggccgcgcgccaccaccaactaccccggcgacgtcgtccgagaagcgccgtgcacggccccggctctggctgcgagcgcgagcggcagcaccgagtcgtcgtcgtcgtcgtcgtcaagggacgacggccacccgccaccgccgctgcctacggcgccgtcgtcgctcggcctgggcctcgggctcttcccggcgacggtggccacccagccgtgcctgttcctggacccggcgccggtggagagggaggaaggggagcgggagcggagctgctgctcccggtcgccgccgtcggtgctggcgggcctcgggttcgacttcgacctcaacctgcctccgcccgccgagatggtcatg

SEQ ID NO: 5585 - DNA, 1158 bp, Zea mays
atgctgctcagccgctacgacaccaagcgcgtcgagggcgccttccgcgccgcccagaccgtgctcatcgtcgaggacctcgttaccagcggcgcctccgtgctcgagaccgtcgccccgctccgcgccgaggggctcgtggtcgccgacgccgtcgtcgtcatcgaccgcgagcaaggtgggcgcgagaacctcgccgctagcggggtcgcgctgcactcgctcatgaccctcacggagatgctcgccgtgctggcgaggcacgggaaggtcggcgaggagaagatcgcggaggtcaggcggttcctccaagccaacaggaaggtggcggtgcccggggtgcctgctgggccacccaagccgtcggctactgctcggaggaagtcgtttgcggagagggcggggttggccacgaaccccatggggaggaggttgttcgaggtgatggaggcgaagcagagcaacttgtgtgtcgcggctgatgttgggacagccaaggagctacttgagcttgctgacaaggttggtccagagatttgtatgctgaaaacacatgttgatatcttgtctgattttacaccagattttggggccaaccttcgcacaattgctgggaagcacaactttctgatctttgaagaccgcaagtttgctgacattgggaacacagtaactatgcaatctgaaggaggtatattccgcatcttagactgggcggatattattaatgcgcatatagttcctggacctgggattgtagatggcttgaagctcaagggtttgcctaaaggaaggggcctacttttgcttgctgaaatgagctcagctggcaaccttgcttatggagactacactgctgcggctgtaaagattgccgagcaacatcctgactttgtaataggatttatatcagtgaatcctgcatcttggtcaccagcaccgtcaagcccagcatttatccatgccactcctggggttcagatagctgctggaggagatgcccttgggcaacaatataacactcccttttctgtcatcaacgacagaggtagtgatataattatagtcggacgagggattataaaggccagtaaccctgtagagaccgcgagacagtatcgcatggaggggtggcaggcgtatcaatccggcttttct

SEQ ID NO: 5586 - DNA, 693 bp, Zea mays
atgtcctgctgccccgcgcctgacactgccgcggccggcgccggcgccggcgcaggcatgtcggtgccgtgcccgtgcagcaggttccagttacgccacggggatctgaagtctggtcctgaggccaccgggtcggccgacaccggcgctcacctcgccagcaagcgccactcgttcgacctcggcaagctcccgggcccgggctcgctgccagtgccggcgtcggcgtcggcgtcgtcgagcgccgcccggcgcttcgtcggctctgtctccgcgagcgagatcgagcagtcggaggactacacccgcatcatcgcgcgcggccccaaccccaagacgacgcacatcttcggcgactgcatcctggagccccgtacggtcgggtgcggtgacagcaaggccgtggagtcgggggaaggaggcgccgggtgctacttcgtggtcaagcgcgccgccccgggcgccggtgacttcctcagctcctgcttcgcgtgcaagaagaagcttgaaggcaacgacatttacatctaccgcggggagaaggcgttctgcagcgccaattgccgggaccaggagatccagctggaggaggaagccgagaacaacacgagcagcggctcccctgggtcctcctcctcctcctcgtcgtcctccaacgacgacatcttcatggccggcatggtggtcgcgacg

SEQ ID NO: 5587 - DNA, 633 bp, Zea mays
atgaacgtatgctggctttcgggcggtgtctcgatgaacttctggtttttgacggtcaggtccccgaccagcacggtcgtcgtcgctgaagaacccggcgatcgagccggagccgtaggtgatcttgcaggtctcgccgtccgccttgtacgtgctagacttggccgacttgtatctgtggtgcaggtagcaggcaatcgagaagtagcatctggaggaggggacccagaggttggagctgccggtgtcgaagatgacggtgaagttctgcggcggcgtgccgatgccgacgaccccgtagtactgggtgttgaggtagtcgacgagagggacgtcgccgccgccggaggccccgagacggcttgcctcctgctgcctcgcggccttggccgccgccagcgcgcgctggtcgagcccgccgccgcgcctgctgagcccgaccctcagcaggccgccggcgccggcgccagcgccgtgaggggacgcgtgcagcagcagcgcgcacgacagcgcccacaggcaggcggctgctgccggcagcaggaggtggccgcgcccgcgccccatgatccttgttgtcttgttagcgtgttctaccttctttttcttccgaacaagtgctggagagcggtt

SEQ ID NO: 5588 - DNA, 693 bp, Zea mays
atgctccgcaagcacacctacttcgacgagctcgcgcagaacaagcgcgccttcgccgccgcgtccgcgtccgcggccaccgcctcgtcgctggccaacaacccttcttcctacgcgtcgctctcccccgcgaccgcgacggccgccgcgcgggagcacctcttcgacaagacggtcacccccagcgacgtgggcaagctgaaccggctggtgatcccgaagcagcacgccgagaagcacttcccgctgcagctcccatccgccggcggcgagagcaagggcgtgctcctcaacctggaggacgccgcgggcaaggtgtggcggttccgctactcgtactggaacagcagccagagctacgtgctcaccaagggctggagccgcttcgtcaaggagaagggcctccaagccggcgacgtcgtcggcttctaccgctccgctgccggcgccgacaccaagctcttcatcgactgcaagctgcggcccaacagcgtcgtcgtcgcctcgacggcaggcccgtcgcctccggcgccggtggcgaaggccgtgcgtctcttcggcgtcgacctgctgacggcaccggccaccgccgcggcgccggcggaggccgtggccgggtgcaagagagccagggacttgggttcgcccccgcaggcggcgttcaagaagcagctcgtggagctggcactagtg

SEQ ID NO: 5589 - DNA, 939 bp, Zea mays
atgatgagcggtagctcgcctccgccgccctcgcttcctgccgggagtggaggcttcttcaggggatacacaaagctgtgcaagggcctcgccgtcatattgctcattgtgcaccttgtagtccagttgtttccgtccgccgtcacctatctcgcgcttatccctggaagaacgatcccttttgcttggaacctgataactgcaggctatgtcgagcaaacaattccagggatggttgtcagcatcattggccttcttttatttgggaagttgttagaacctctatggggttcaaaagagttatcaaagttcatttttatcgtcaacctttcaacttctgcttgtgttttcatgactgctattgtgctgtactatataactcagcaagagatctacctctatactcctttttctggattttatggggttctatcaggattgttggtgggcattaaacagcttttacctgatcaagagcttaatctttttgtgctaaaaattaaggcaaagtggattccatctcttgttgcattgatatccattcttggaagcatcttcatatacgactttatgtcttacctcccagttctgttgtttggcatgtatatgagttggatctacctccgttactttcaaaagagacttgagaccagcctgaaaggggatccaagtgaggagttctctttctcaagcttcttccctgaatttgtaagaccatttctcgacccaatagcatctgtattccataggttactttgtggaagatctgatgccaggggagaaacattagacacctcaccattacctggttcagattcgtttgaggcaaacaggaggagagagaggggtcaacgggcactggagcaaagattagctgagaagctggctgcagtcaggagttcagagggcggcacatcactggatgccgctgacaaagtt

SEQ ID NO: 5590 - DNA, 927 bp, Zea mays
atggagaccatccaggaggccgaggtgcccggttcgacgtccgccgccgcggccgatcaccggacgtacagcaaccccgcgttccaagtgtccgggaacattgaggaggcttggtacgattccttggcgatgagcgagtcggatgccgaagacgatttccacagcgtgcaagatgattctttttcattgaatggcttcgagaacgaagctgcattgagcatgagagatggcaacggtgggagcttcaatggagctgcgcaatcaggcgagcagcaacataaaaagccaaagtccagcgaactgtcaaaggggagcttggagaatggtgtgaggtcgtccatgagcaacgaggatgcggtgagtttttctggtgcggacaacactcacggtggagagaggatactggaagtttgcgggcttctgccaaataattgtctaccctgcattgcctctgctgttggggtaagcgagaagaagagaactctttcctcgagccctactcattcaatgaggatgccttctttgaagctttccttcaagaagaagtcaggggaagctcatccatcttccacactactatctacgaaggatttcctggaaaggcctctagcaggttctcaagtacagttgtgccttgctggaaacaatatgcccaacagttggactcatattgatcctggtacattccgagtccgtggagcaaactatttagggataagaaaaaagagcttgctccaaattatgctgcatattatccatttggagttgatgtgtacttatcgccacagaaactcaatcatatatctcgatttgttgaacttcctgatattcaactctccagcaagctcccacctcttttggtggtcaatgtacaggtgccattgtatccagcttcattatttcagaatgagactgatggggaaggga

SEQ ID NO: 5591 - DNA, 480 bp, Zea mays
atgccgacgccttacgttgagcaccagaaggccgtcactatccgcaacgacatcaaccttaagaaggagacgcttcggatcgagcctgatgaagaacgccctggccgcttcctcgtcgccttcacctttgacgccacggtcgctggcagcatgactgtttacttctttgcaaaggaagagctcaactgcaatctaacaacagtgaaagaagacctaattaagcccattactgttagcttcaaagagggtcttggtcaaaaattcaggcaaccttcaggaacaggaattgacttttcagtgtttgaagaatcagatttattaaagcagggggacatggatgtatatccacttgcagttaaagctgaaacaacattgtctgttgatcacccaccagaaggggatgaccaaaagatgataactcctaactcacagatcacccagggcccgtttttgaaaagaaagaaaatggggattatcaag

SEQ ID NO: 5592 - DNA, 342 bp, Zea mays
atggcggccgtgctgaggagagccgtggcgcagtgcttcgcgtcgtcgtcgtcgtcgtcgccggcgacgttcgggctccggcggttcctgcaggagcagccggcgttccgccccgccgtgccgcccgaccgcttcatgcccctggccgaccggatccgggacctcggggtcggcgtcgcattcccgcggatcaacctcgacggcctcgtgccgcccgcgccggcgccggcgccggccaagcgggagccggacgcggcgctgcccgcggcgagcctcacggtggaggaggcgcgcaaggtgttgcgcgccacacagatggaggcggcccgcgcgcggattcgg

SEQ ID NO: 5593 - DNA, 912 bp, Zea mays
atggaagccagcagcaagaagctccaggcgttcatcctcacgctgctgctggtgctctccaccgccgtgactcccatcctctcgctgtcagtgccagacgacgaggtagcctgcgactgcgataaacccaaggcgcccaagccgtcgcacccgcccaagaccaagccctcccacccgtcgccgtcgccgaagcccaagaatcccaagccacccaagggcagcaccgggtacccagcgccggggcaccaaccgcccaagagcccctcctaccccccggtcgtcggccctcccaagggccccgtcacgcgcccgccagtcatgcgtccgccggtcgtcggtcctcccaagggccccgtcacgcgcccgccggtcacgcgtccgccggttgtcggaccaccggtgacctacccgccgatcaccggccctccgacgacgccgcctgttgtcggaccaccggtgacctacccgccgatcaccggccctccaacaacgccgcctgttgtcggcccaccggtgacctacccaccgatcactggcccgcctgcgacgacgcccccggtcaccggtccgcccgtgacctaccctcccggcggaggcgggggaagctcgacgccgtgcccgccgccaccgagcccgacgccgacgccgtcgtcgcctacgtgcccggctgactcgctgaagctgggcgcgtgcgtggacctgctgggcgggctggtgcatatcggcctcggcgaccccgtggtgaacaagtgctgcccggtgctggaggggctggtggagctggaggcggccgtgtgcctctgcaccaccatcaagctcaggctcctcaacatcaacctctacctgccactggcgctccagctcctcctcacctgcggcaagacgccgccgccgggctacacctgcaccgtc

SEQ ID NO: 5594 - DNA, 1068 bp, Zea mays
atgcccaagggcgtcatgctcacgcatcgcagcctcgtcaccagcgtcgcgcagcaggtggacggcgagaacccgaacctgtacttcagcaaggatgacgtggtgctgtgcgtgctgccgctgttccacatctactcgctgaactcggtgctcctggcggggctgcgcgccggctgcgccatcgtgatcatgcgcaagttcgagatcggcgcgctggtggagctggtgcgcgcgcacggcgtgaccgtggcgcccttcgtgccgcccatcgtggtggagatcgccaagagcccccgcgtgggcgccgccgacctcgcctccatccgcatggtcatgtccggcgccgcgcccatggggaaggacctccaggacgcgttcatggccaagatccccaacgccgtgctcggccaggggtacgggatgaccgaggcggggcccgtgctggccatgtgcctggccttcgccaaggagccgttcgaggtcaagtccggctcctgtggcaccgtcgtcaggaacgcggagctgaagatcgtcgacccagacaccagcgcgtcgctgggacggaaccagccaggcgagatatgcatccgcggcgaacaaatcatgaaaggttatctgaatgatccagaggcgacaaagaacaccattgataaggacggatggctgcacaccggggacattggttatgtggacgatgacgacgagatcttcatcgttgacaggctgaaggagataatcaaatacaagggcttccaagtacctcctgcggagcttgaagcccttctcatcacacatcctgaaatcaaggatgccgctgttgtctcgatgaaagatgaagtcgccggcgaagtcccggtggcattcattatacgcagtgaaggctctgagatcagtgagaacgagatcaagcagtttgttgcaaaggaggtcgtgttctacaagaggatcaacagagttttcttcacggattctatcccgaagaatccctccggcaagattcttaggaaggacctgagagcgcggcttgccgcgggcatcccaagcagtgacaacacacagtccaaaagt

SEQ ID NO: 5595 - DNA, 240 bp, Zea mays
atgaggacgtgccagtggttcttgacggcgttgtcggtgcggcccgggaagaggcgcgcgatgagagcccacttgttgccgtacgcgcggtgcgccgccaggagccgctcctcctcctcctccgagaaggcgcgccggttgatccgcgggtccagctggttgaaccaccgcaggcggcagctcttccctgatctgccgtccagcctctcggcgatgaggttccagttctggggcccaaac

SEQ ID NO: 5596 - DNA, 1086 bp, Zea mays
atgcaccagcacgagatactagccatcatgcgcctgtcgtccctcctcctcgtcgtggccgccctctcggcgcgcgccgcggcgcagcaggtgccgccggtgggcggcagcgctctgaagccggactactacagccagtcgtgcccgcgcgcggagcggatcatcgcggaggtgatgcagacgaagcagatggcgaacccgacgacggccgcgggcatgctgcgcgtcttcttccacgactgcttcgtcaccgggtgcgacgcgtcggtgctgatcgcgtccacccagttccagaagtcggagcacgacgcggagatcaaccactcgctccccggggacgccttcgacgccgtggtgcgcgccaagctggccctggagctggagtgccccggggtggtgtcctgcgccgacatcctcgcgctggcgtcgggggtgctggtcaccatgaccggcgggccccggtacccgatcccgctggggcgcaaggactcgctgtcgtcgtcgcccacggcgcccgacgtcgagttgccacacgccaacttcaccgtggaccgcctcatccagatgttcggcggcaaggggttcacggtgcaggagctggtggcgctgtccggcgcccacacgctgggcttctcccactgcaaggagttcgccgaccgcctctacaacttccgcagccagggcgggaagccggagccgttcgaccccagcatgaacccgtcctacgccagggggctgcaggacgtgtgcaaggactacctcaaggaccccaccatcgccgcgttcaacgacatcatgactcccggcaagttcgacaacatgtacttcgtcaacctggagcgcggcctcggactgctcagcaccgacgaggagctgtggacggacccccgcaccaagcccctggtgcagctctacgcgtccaaccccactgccttcttcaccgacttcggccgcgccatggagaagctcagcttgttcggcgtcaagaccggcgccgacggcgaggtcaggcggcgctgcgacgcgtacaacagcggccccgacgttggcggcgccatgcctatggctatgcccatgcccaagatg

SEQ ID NO: 5597 - DNA, 522 bp, Zea mays
atgtcgtctcctgaccatcggtcccggttctaccagttttcaagacgaacgacaactcgtcggtggtgcagaccaccaacgccacgacatacgggctctgcgacgccagcgacgacctggcggagacgacgtccatctacggcggcggcggcggcgggggcggcggcctcgagcagaacagcaccatcgcggtggcgctcaccgccgagggcgccaactacttcttctccgaggccgacgggggcgcgcagtgccagcaggggatgcggttcgagatcaaggtcgagcacggccggggcctgccgccgtcgctactgcaccagccgccggcgcccaagggccgcgtcctcgcgccgccgccggcgggcacggcgttctcgggcaccggcggggtcgagcccggcgacggcgccggggacaacggcggcgctggcacgagcggcgcgtgcagggcggccagcggccggttcttgggggtggtggctgctgctgctgcggctctggccgttttggttctttgag

SEQ ID NO: 5598 - DNA, 2475 bp, Zea mays
atggcgggcctcgcgcccaaaaccaaggtgctcagggacggcaagtggaaggaagaggaggcgtccatcctcgtgcccggggacatcatcagcatcaagctgggtgacatcattcccgccgacgccaggctgctggagggcgacccgctcaaggttgaccaggcggcgctcacgggcgagtcgctgcccgtgaacaagcacccgggccagggggtcttctcgggctccacagtcaagcagggcgagatcgaggccgtcgtcatcgccaccggcgtgcacaccttcttcggcaaggcggcgcacctggtggacagcaccaacaacgtgggccacttccagctcgtgctcacggccatcggcaacttctgcatcatctccattgccgtcgggatggtcatcgagatcatcgtcatgtacccgattcagcaccgcgcgtaccgcgatggcatcgacaacctcctcgtcctgctcatcggcggcatccccatcgccatgcccaccgtgctctccgtcaccatggccatcggctcccaccgcctgtcccagcagggcgccatcaccaagcgcatgaccgccatcgaggagatggccggcatggacgtgctctgcagcgacaagaccggcaccctcaccctcaacaagctcaccgtcgacaagaccctcatcgaggtgtgcggcaagggcgtcgacaaggacatggtgctcctctacgccgccagggcctcccgcgtcgagaaccaggacgccatcgacacctgcatcgtcggcatgctcgccgaccccaaggaggcccgcgccggcatcaaggaggtccacttcctccccttcaacccggttgagaagcgcacggccatcacctacatcgacggcaacggcgactggcacagggtcagcaagggcgcccccgagcagatcatcgagctgtgccggatgagcaaggatgccgagaagaagatccacgccctcatcgacggctacgccgaccgcggcctccgctccctgggcgtgtcgtaccagctggtccccgagaagagcaaggagagcgccggcgagccgtggcagttcatcggtctcctcccgctgttcgacccgccgcggcacgacagcgcggagaccatccgccgcgcgctccacctgggcgtgaacgtgaagatgatcaccggcgaccagctggccatcggcaaggagacggcgcggcgcctgggcatgggcagcaacatgtacccgtccaccaccctgctgggcgacaacaagaccggcgagatgggcggcctgaacatcgacgagctgatcgagaaggccgacgggttcgcgggggtgttcccggagcacaagtacgagatcgtgaagcggctgcaggaccggaagcacatctgcggcatgaccggggacggcgtgaacgacgcgccggcgctgaagaaggcggacatcggcatcgcggtggacgacgcgacggacgcggcccggagcgcgtcggacatcgtgctgacggagcccgggctgagcgtgatcgtgagcgccgtgctcaccagccgcgccatcttccagcgcatgaagaactacaccatctacgccgtgtccatcaccatccgcatcgtgctgggcttcctgctcgtcgcgctggtctggaagttcgacttcgcgcccttcatggtgctcatcattgccatcctcaacgacggcaccatcatgaccatctccaaggaccgcgtgaagccgtcgccgacgcccgactcgtggaagctcaaggagatcttcgccacgggcatcgtgctagggacctacatggcgctcgccacggcgctcttcttctacctggcgcacgacaccgacttcttcaccaacgccttcggcgtgcggtccatcaaggagaacgacaaggagctgatggcggcgctgtacctgcaagtgagcatcatcagccaggcgctcatcttcgtgacccggtcccggagctggtccttcgtggagcggcccggcgcgctgctggtgatcgccttcctggcggcgcagctggtggcgacgtgcatcgccgtgtacgccaactgggagttctgcaagatgcagggcatcggctggggctggggcggcgccatctgggcgttcagcgtcgtcacctacttcccgctggacgtgctcaagttcgccatccgctacgcgctctccggcaaggcctggaacaacatcaacaacaagacggccttcaccaaccgcaccgactacggcaagggcgagcgagaggcgcagtgggccacggcacagaggacgctgcacggcctcaaccaggccaccgccacctccgacctcttcggcgacaaccagggctaccgcgagctgtcggagctcgccgagcaggcggccaagcgcgccgaggtggccaggctcagggagctgcacacgctcaagggacacgtcgagtccgtcgtcaagctcaagggcctcgacattgacaccattcagcagagctacaccgtg

SEQ ID NO: 5599 - DNA, 549 bp, Zea mays
atgccacggaccgcatggtgtccatcctggcggacgagcacatcgtggacctgcagaacctcgtggtccgcctcacctttgacaacatctgcggcctcgccttcgggaaggaccccgagacgctcgcccggtgcctccccgacaacgccttcgcctccgcgttggaccgcgccacggaggccaccctcaaccgcttcatcttccccgagtgcgtctggcgctgcaagaagtggctgggcctcggcatggagacgacgccggcgcgcagcgtccgccacgtcgaccgctacctctcggctgtcatcaaggcgcgcaacctcgagctctccgcctccttgccgccgccgccacgaggaaggacctcctctcggccacgccgcacgacgacctcctctcgcgcttcatgcgcaaggggacctactccgacgaggcgctgcagcacgtggcgctcaacttcatcctcgccggccgcgacagctcctcggtggcgctctcctggttcttttggctggtctccacgcaccccgccgtggagcgcaagaatatttg

SEQ ID NO: 5600 - DNA, 678 bp, Zea mays
atggacaactcgccccactcgtacctcgccttcgacggcgccgaggagttcgcccgtgcgcagggcctggagaccgtggacaacagctacttcatcacggatgacaacgtcggcatgctcaagctcgccaaggaggccggcagcatcctgttcgactaccggatcccgctggcggggacggacacgtgcagcgcgctggcgggcgcggcggacagcaacggcggcggcgtgcacaaggcggggatggtcatgaacgggctgcccatcagcgtgtacgcgccggagacggtggggtgcgcggtggtggacgcgtcgggggcctgcgcggcggccacgtccacgggcgggctcatgaacaagatggccggccgcatcggggactcgccgctcatcggctccggcacctacgcgtgcggcgcctgcgccgtgtcgtgcacgggcgagggcgaggccatcatccgctgcacgctcgcgcgcgacgtggccgccgtcatggagtacaagggactgcccctgcagcaggccgtcgactactgcgtcaaggagcgcctcgaccagggattcgccggcctcatcgccgtctccggcaccggcgaggtggcgtacggattcaactgcaccggcatgttccggggctgcgccaccgaggacgggttcatggaggtcggcatctgggag

SEQ ID NO: 5601 - DNA, 963 bp, Zea mays
atggagttcgacgaatacgagtacctggagaaggcggtggagccggctcccccgccggccaatggttccggctccggcgagaaggaccgcggctcgcgtcgccgcgagggcgacgagggccgcatatcgaagcgctcccgctcgggggaggaccgcgagcggggccggcaccgcagcgttcgggaacaccgggatcgggataaggatgacgggaaggagaaggagaggagccgcgatagccgcgggaaggacagagacagggaagggagagaacgggagaaggagaggggggacaggcaccggcccagagagagggaggtggaacgggagcggaggagcctgagccgttcggagcggcgccgtatcgaggaagaggagatggtgagggagctggagatggagcgcgagcgcagcgagcgacaccactatcgcgaccgtgacgtcaggcgtaggaaagatgacggggcagagccagaagttgatccagaaagggaccagaggactgtatttgctttccagctatctctgaaggcagacgaaagagatgtttatgagttcttctcaagggctgggaaggttcgtgatgttcgtcttatcatggaccgaaactcaagacgttctaaaggagttgggtacattgagttttacgatgttatgtctgttccaatggcaattgctttgtctggtcaaccgctgcttggacaagcagtgatggttaagccatctgaggctgaaaagaacttagttcagtcaaatgcgacatcaggtggtgcggcttcaggtggagcaagaaagttgtatgttggcaatcttcactcaaatattactgaagaccaattaagacaggtatttgaaccatttgggcaagtggagcttgtacagcttcctctagatgcaatgactggactgtgcaaaggttatggctttattcagtttgcccggcttgaagatgcaaaagctgca

SEQ ID NO: 5602 - DNA, 534 bp, Zea mays
atgaaggagaccaccagggaggtcaagtgggagaagcggaagcggcagatacaacggcagaggagcagcatgcgcctgagcgaagccgacgacagggcaggtggcagcactgctgtctgtcctgttgacggcgaggcgagctcgagcgcggagcgggtggccactggtataaccgacggggacctggatgagctgaggggatccatggatctcggcttcaggttcgacgagcagaagggcggccaggacctctgcgacaccctccccgccctcgacttctatttcgccgtcaaccggcaggtgtcggagcccaggatgtcgtttcccacgagcacgagctcagggccgtctctgtcggccaccaagtcctcgcccaacctctgcggcacgcccagcccaggtagccctggtgcgcactctagtaacgccttggagtcatggaagatttgcaacccaggagataaccctctgcttgtgaagacaaggctcaggcactgggctcaagtagtggcttgttcagtgaagcactcgagc

SEQ ID NO: 5603 - DNA, 597 bp, Zea mays
atgatgcggaacatgtcgttgtacatcatcagctggaggcggcggcggagcacgacgccgccggccgcggcctcggggtccttcctcacgtcctccaccaccagccgggcctcctcctcccacccggcgcggttctgggccaccaccttgttggtgaagaaggggacggtcatgatgcgccgcatcttgcgccagtggtcgccgtacaccgtgaacaccatgtcctgccccttgcccgtgaagatgtcgaacaccacgttgcgggtgcgggagccgaactccacgccctgcgtgtggagcacctccttggccagctccggggtcgacaccaccaccaggttgcgcacgcccatgcgcagcaggaagatgtcgccgaaccgcttcgccatggccatcaggttgcggtggttcaggtcgtcgcccacctgcagccagtttcccaccacgggggcgcccgggggccccggtgggaggcggtaccgcttgccggtcagcttggccacggcgatggccaccacagccgcggcgaacaggcccagcagggccttctctaggagggcgaggtccatgctgtgctgcctgccggtccggccgggg

SEQ ID NO: 5604 - DNA, 651 bp, Zea mays
atgggagaagcgtgcagggacgcggcggctgcgggccggcagctgctgcaggacgaagcgggcggaggaggagggcgtcacgcggagaaggagctcgtcggtgacccgacccacgactcggccgtctcggcgaagctgtacgaggacgtgccggcgacgccgatgatggcgctcaaccacatctcccgcctgtgcgaatccgtcgacgcctccgtccggttctacgtcaaggcgctcggcttcgtgctcatccagcgcccgccggcgctcgacttctccggcgcatggctcttcaactacggcgtgggtatccacctcgtgcagcgcgacgacgcgcggcgggcccccgacgtgaggccggaggaggcggagctggaccccatggacaaccacgtgtcgttccagtgcgaggacatgggcgccatggagcggcggctgcgggagatgcgcgtgcggtacatgaagcggaccatcaacgaggaggaagggtcgcccatcgaccagctcttcttcagggacccggacggcttcatgatcgagatctgcaactgcgagaacctggagctcgtccccgccggcgccttcggccgcctcaggctgccccgcgaccgccacaacccgcccgtgcgcatggtcgccggcagcgacgag

SEQ ID NO: 5605 - DNA, 135 bp, Zea mays
atggtactcttctgctctatagaacctcttcgctggaacgatctcggtgacgatcttccggttcagaagcttctgctgcttctccagggactctcttgccgccttctcctgctctgggttatagtagtatatccc

SEQ ID NO: 5606 - DNA, 438 bp, Zea mays
atgacgacgagcctgaagaagaaccggaagaagcgcgggcacgtgtcggcggggcacggccgcatcggcaagcaccggaagcacccgggaggccgcggcaacgccggcggcatgcaccaccaccgcatcctcttcgataagtaccacccgggctacttcggcaaggtgggcatgcgctacttccacaggctccgcaacaagttccactgcccgtcggtcaacgtggagcggctctggtcgatggtgcccgccggcaaggccgcggaggcggccggcgcggaccaggccccgctcgtcgacgtgacgcagttcggctacttcaaggtgctcggcaaggggatgctgccgtccaggcccatcgtcgtcaaggccaagctcatctccaaggtcgccgagaagaagatcaaggctgccggaggcgccgtcctgctgaccgct

SEQ ID NO: 5607 - DNA, 390 bp, Zea mays
atggctccgtcgctcgcgtcgacggcggggctcccgagctgcggggcgcggcgcggcggccggtgcgtggcccgccgcgcgtccgcggttgcgactccggcgacggcgacggcgaggacgcactacgaggtgctcggggtcggggccggcgcgagccggtgcgagatcaaggcggcgtaccggcgcctggcgagggaggtgcacccggactgcggcggccgcggcgacgaggggttcatccgcctgcacgccgcgtacgccacgctcgcggaccccgacgagcgcgcgcgctacgaccgcgccgcggcggtccggagccggatcagggcggcgccgtcggggtccggggcggggttccggccgcgaaggtgggagacggaccagtgctgg

SEQ ID NO: 5608 - DNA, 729 bp, Zea mays
atgctgcgccacgccgcccgccgcctcgtttcccgcgccgtcgctccgcccaccgcgcgccgggcgctcgccacggcggaggtgcccgcggaggccgtcgaggactccacgttcgtcgaggcctggaaaaaggtcgcccccaacatcgagcccccagcgacgcccctctccctcatgcagccgcgcccgcccacgccagctaccatccctaccaagctcaccgtcaacttcgtcctcccctacaagtccgagatcgccaacaaggaggttgacatggtaattgtaccagctacaactggtcagatgggtgttttgccaggccatgttgccacaattgcagagctcaagcctggtgttctctcagtacatgaaggaaacgatgtgagcaagtactttgtgagcagtgggtttgctttcgtccatgcaaactccattgctgatattgtggctgttgaggctatccctgtggatcagatcgacccagcattggttcagaagggtctcgctgaattcactgccaagcttggttcggcctctactgacctggagaaggctgaggcccagatcggagtcgatgttcacagtgcccctcaatgctgcattgaccggttaattggtggcattttaaattgtcttgtctttttcatctacagttttagagtgagtttaagtttgcaaactcatgggcatgggatggagggaatgatcctaaataaattatactccatc

SEQ ID NO: 5609 - DNA, 1221 bp, Zea mays
atggtcaaccacttcgtccaggagttcaagaggaagaacaagaaggatatcactggcaaccccagggctctccggaggctgaggaccgcttgtgagagggcgaagaggactctgtcttccactgcccagaccacgattgagattgactcgctgtatgagggcatcgacttctactccaccatcacccgtgccaggtttgaggagctcaacatggacctgttcaggaagtgcatggagcctgttgagaagtgcctgagggatgccaagatggacaagagcaccgtccatgacgttgtacttgttggtggctccactaggatccccagggtgcagcaactgctccaggacttcttcaacggcaaggagctgtgcaagaacatcaaccccgatgaggctgtcgcctatggtgctgctgtccaggctgccatcctgagcggtgagggcaatgagaaggtgcaggacctgcttctgctggacgtcacccctctgtccctgggtctggagactgctggaggagttatgacagtgctgatcccgaggaacaccaccatccccaccaagaaggagcaggtattctccacctactcggacaaccagcccggtgtcctgatccaggtctacgagggtgagaggacccggacacgcgacaacaacctgctgggcaagttcgagctctccggcatcccccctgcaccccgtggtgtgccacagatcaccgtgtgctttgacatcgacgccaacggcatcctgaacgtgtctgccgaggacaagacaacggggcagaagaacaagatcacaatcaccaacgacaagggccgtctctccaaggaggagatcgagaagatggttcaggacgctgagaagtacaagtctgaggatgaggagcacaagaagaaggtggaggccaagaactcgctggagaactactcctacaacatgcgcaacacgatcaaggacgagaagattgcgtccaagctgccggccgatgacaagaagaagatcgaggacgccatcgacgcggccatcagctggctggacgccaaccagctcgccgaggcggacgagttcgaggacaagatgaaggagctggagagcctctgcaaccccatcatcgccaagatgtaccagggcgcgggtgaagacatgggcggcgctggcggcatggacgaggacgcccctgccggcagcggcggccctggccccaagatcgaggaggtggac

SEQ ID NO: 5610 - DNA, 1341 bp, Zea mays
atgggtaaagagaagtcccacatcaacattgtggttattggccatgtcgactctggcaagtcgaccaccacaggacaccttatctacaagcttggaggcattgacaagcgtgtgatcgagaggtttgagaaggaggctgctgaaatgaacaagcggtccttcaagtacgcgtgggtgctcgacaagctcaaggctgagcgtgagagaggtatcaccattgatattgctctgtggaagtttgagaccaccaagtactactgcacggtcattgatgcccctggacaccgtgacttcatcaagaacatgatcactggtacctcccaggctgactgtgctgtccttatcattgactccaccactggtggttttgaggctggtatctccaaggatggccagacccgtgaacatgctctccttgcgttcacccttggagtgaagcagatgatttgctgctgcaacaagatggatgcaaccactcccaaatactccaaggcacgttatgaagagattgtgaaggaagtctcatcctacctcaagaaagttgggtacaaccctgataagattgcctttgttcccatttctggttttgagggtgacaacatgattgagaggtccaccaaccttgactggtacaaaggcccaaccctgcttgaggctcttgaccagatcaccgagcccaagaggccttcagacaagcccctgcgtctgcccctccaggatgtgtacaagattggtggtattggaactgtaccggttggtcgtgtggagactggtgtcatcaagcctggtatggttgtcacctttggtccaactggcctgactaccgaggtgaagtctgttgagatgcaccacgaggcgcttcaggaggctcttccgggtgacaatgttggcttcaacgtgaagaacgttgctgtcaaggatctcaagcgtgggtttgtggcctccaactccaaggatgaccctgccaaggaggctgccagcttcacctcccaggtcatcatcatgaaccaccctgggcagattggcaacggctatgccccagtgctggactgccacacctcccacattgctgtcaagtttgctgagctcattaccaagatcgacaggcggtctggcaaggagcttgagaaggagccaaagttcctgaagaacggtgatgctggtatggtgaagatgataccgaccaagcccatggtggtggagacgttctcagcgtatcctccccttggtaggtttgctgtccgtgacatgaggcagacggttgcttttggagttatcaagagtgtggagaagaaggacccgaccggcgccaaggtgaccaaggcggctgccaagaagaaa

SEQ ID NO: 5611 - DNA, 462 bp, Zea mays
atggctttcgcagcagtgccttcccacgaggagcaggaggcgtggatcgcgaccgcctgtgacgtcgacgcgcgccgggcggaggtggaggtggaggaggcgcgcgagcaggctgctccggcgccggacgagccgtgcctgtcctcgttcgtggacatgtcggagatcttccccgccagcgtcacgctcagcagcggcggcgacgtggacaatagcggcaacaagccagacgaggaaacggccccgcgaccgcagctgttggccacgacggcgctggtgccggtgacggaaaagaagggcggctacgacgtggcccaccccgaccgcggcacggtgatctcgcgctacaaggagaagcggaagaacaggaggttcggcaagcagatccggtacgagtcgcgcaaggcccgcgctgacggccggatgcggatcaaggggcggttcgccaagtccggcgaggtc

SEQ ID NO: 5612 - DNA, 873 bp, Zea mays
atgtggagcgcggcgtggatgtactacgccacgggcaacaacagctacctcaccttcgccaccgacccgcggctgcccaagaacgccaaggccttcttcaacatcctcgacttctccgtgttcagctgggacaacaagctcccgggcgcccagctgctgctgtcgcggctgcgcatgttcctcaaccccggctacccgtacgaggagtcgctcgccggctaccacaacgccaccagcctcaacatgtgcatgtacttcccgcgcttcgccgccttcaacttcaccaagggcgggatggcgctcttcaaccacggcagggggcagccgctgcagtacgtcgtcgccaactccttcatcgctgcgctctacgccgactacatggaggccgtcaacgtccccggctggtactgcggtccaaacttcatgaccaccaacgacctccgtgagttcgccaggtctcagatcaactacattctcggtgacaaccccaagaagatgagctacgtggttgggttcggcagcaagtacccacggcacgtgcaccaccgtggcgcgtccacgccgcacaacggcgtcaagtactcgtgcaccggcggctacaagtggcgcgacagcaagaaagcggaccccaacctgctggggggcgccatggtcggcgggcccgacaagaacgacggcttcaaggactcgcgcaacaccttcgggcagaacgagccgacgctggtaggcaacgccggcctcgtcgcggccctggtggctctcaccagcagcggcaggggagtcggcgtaaccgccgtcgacaagaacaccatgttctccgccgtgccgccaatgttccccgccgcgccgccaccaccgtcatcatggaagcca

SEQ ID NO: 5613 - DNA, 1071 bp, Zea mays
atgtggaagatggaggaagggttattgattgatacatcccgtgcacttggtggcaccatccgggcgattgcagctgactcgaggcttttagtgagtggaggaactaatgcctatattcagtgttggagggccgttgaaggcaatggtcaattatttcacatctctggaagtggtaccgaccagaatgcggagtttcgcctctggggtcatgaaggtcctgtgacttgtcttgccctggattcactgaggatttatagtggttcttgggacatgactgttcgtgtttgggacagagaccagatggagtgtgtgcaaaagttcatgcatgcagactgggtttgggatcttgctctgcgtggaaatactgttgccagtactgctggtagagatgcatatgtatgggatatcagggctggcgagttaacaagcttaatttccaatgcccatgttggtagcgcatattcaattgcttggacacacctgccagatgtgctgtttactggtggagaggatggtgctattcgattgttcaatgtttctgatgtctgtgatgatgagggtgacattaaaccagtggcaacttgggtgccacattcaggtcctgttcattctcttgcttttgagtatccatggcttgtgtcagcctcgagtgatggcaggattgcacttattgatttgaggaagcttctgtcctccaaaagttcatcaaagggtctgcgtgttaagagagttgatggaagcgcaatagagcctccacagaggatgcttcatggcgttggatgtgatctcttctccatcgctattggtgcagataggattgtatgtgccggtgaggatggttctgttagagtctggaacttctcagaagcattggagattgagaggagggcacaggctctaaggagtttgaggcaggagaaccgcatcaggcggaggaaatcacaagcggagatgaatacaaatactagaaggcctgaccagtgttcaatagccatgaaaaagaaccaactgaagggtgataagagcgcaacttggcacaacaagcgtgccattaatgagaaggccaagtct

SEQ ID NO: 5614 - DNA, 1038 bp, Zea mays
atgtacatttcggtcccgctgctgctctacgtcggtgaaaggatgcttagagccttgaggtcaaatgcttataccgtgaaaattctcaaggtgtgtcttctacctggaaatgtgttgaccataacgatgtcaaagccctatggatttcgttacagaagtggacagtacatatttcttcaatgtccaataatttctccatttgaatggcatcctttctccatcacttcagcacctggagatgactacctcagtgtccacatccggacaaacggtgactggacacaggagctcaagcgcatatttgtggagaactacttctcgccgcatctcaacagaagagcttcgtttagcgagctaggtgcggcagaaccaagaagcttgccaaaattactcgtagatggtccctatggtgcccctgcgcaggattttagaaactacgacgttctacttctcgtcggcctcggaatcggggcaacaccgttcataagcattctacgggatctgcttaataacattaagatagctgacgagctgatggacttggcaatggagaccagcaggtctgaagacagcgccaacagctttagcgtctcaacggcgagtagcaaccggaagagagcatacagaacaagccgtgcacatttctactgggtcacccgagaagccggatcctttgaatggttcaaaggggtgatgaatgaggttgcagaaatggacaagaagggtatcatagagctgcacaattacctcactagcgtttacgaggaacgcgacgcacggacaactctgctgtccatggtccaggctctgaaccacgccaagcacggcgtcgatatcgtatcggggaccagggtgaggacgcatttcgccagacccaactggaaggaagtcttcaccaggatcgcctccaagcatccgaattcaacagttggtgtgttctactgcggcgcaccgacgcttgccaaggagctgaaggctctggcgcacgagatgagccacaggacgggcactcgcttccatttccacaaggagtacttc

SEQ ID NO: 5615 - DNA, 486 bp, Zea mays
atgtcagctggtctattatttggtaatgtgactggtacaattattgtttcagtcggtggaacgctagctgcagcggtggccttccttattgctagatactttgccagagagagaattcttaaattggttgaaggaaataagaagtttctggcaattgataaggcaataggtgaaaatgggtttaaggttgttactttgctacgcttgagtcccctgttacctttctcccttgggaactatctatatggccttacttcagtgaagttcttgccgtatgtcttgggcagttggttgggaatgcttccaggttcatgggcttacgtcagtgccggtgcattcgggcgagctttaatccaagatgagtcggaaattggtttgggaggaaacgaacagctatggacactgggcgttggattattgtttacagccattgctgccgcttatgtaacgaggctcgcaaaggacgctgtaaaggagatcgacgac

SEQ ID NO: 5616 - DNA, 714 bp, Zea mays
atggccgccgcgctcaggtgcccggcctccgtcagggtctcgggccccgccgccgcggggctcgccaaggtgcgccaggcgtccagagtcgtcgcggtgagcggggcccggcagagccgcggcggcggcgtcgccgtgcgggcgtcgctgttctcgcccaagcccgcggcggccaaggacgcgcggccgaccaaggtgcaggagctgtacgtgtacgagatcaacgagcgggaccgcgagagccccgcgtacctgcgcctcagcgccaagcagacggagaacgcgctgggcgacctcgtccccttcaccaacaaggtgtacaacggcagcctggacaagcggctgggcgtcaccgcgggcatctgcgtgctcatccagcacgtccccgaccgcaacggcgaccgctacgaggccatctacagcttctacttcggagactacggccacatctcggtgcagggcccgtacctgacctacgaggagtcgtacctggcggtcaccggcggctccggcgtcttcgagggcgtctacggccaggtcaagctcaaccagatcgtcttccccttcaagatcttctacaccttctacctccggggcatcccggacctgcccagggacctgctctgcacgcccgtcccgccgtcgcccaccgtcgagcccacccccgccgccagggccgccgagccgcacgcatccctcgacaactacaccaac

SEQ ID NO: 5617 - DNA, 639 bp, Zea mays
atgttctacgcgccggtgctgttcaacacgctggggttcaagagcgacgcgtcgctctactcggccgtcatcacgggcgccgtcaacgtcctctccacgctcgtctccgtctactccgtcgaccgcgtcggccgccggatgctgctgctggaggccggcgtgcagatgttcctgtcgcaggtggccatcgccatcgtgctgggcatcaaggtcaccgaccactccgacaacctgggccacggctgggccatcatggtcgtcgtcatggtctgcaccttcgtctcctccttcgcctggtcctgggggcccctgggctggctcatccccagcgagaccttcccgctggagaccaggtcggcggggcagagcgtcaccgtctgcgtcaacctgctcttcaccttcgtcatcgcgcaggccttcctctccatgctctgccacctcaagtacgccatcttcgtcttcttctccgcctgggtcctcgtcatgtcgctcttcgtcctcttcttcctgccggagaccaagaacgtgcccatcgaggagatgaccgagagggtgtggaagcagcactggttctggaagcgctacatggacgacgacaaccaccacatcgtcaacggcaagctcaccggcgcctccgtt

SEQ ID NO: 5618 - DNA, 543 bp, Zea mays
atggagcgcgaccgccggcgcaagctcaacgagaagctctacgcgctgcgcagcgtcgtgcccaacatcacaaagatggacaaggcgtcgatcatcaaggacgcgatcgagtacatcgagcagctacaggcggaggagcggcgggcgctgcaggcgctcgaggccggcgagggggcgcgctgcggcggccacgggcacggcgaggaggcgcgcgtggtcctgcagcagcccgccgccgccccggcgcccgtggaggtcctggagctgcgcgtgtcggaggtgggcgaccgcgtgctggtggtgaacgtgacgtgcagcaagggccgcgacgccatggcccgcgtgtgccgcgccgtcgaggagctccggctccgcgtcatcaccgccagcgtcacctccgtcgccggctgcctcatgcacaccatcttcgtcgaggtggattcggaccagacgaatcgtatccagatcaagcacatgatcgaggccgctctcgcccagctagatgatgcctccgcgagcccgccgagcgtgatgagctactat

SEQ ID NO: 5619 - DNA, 798 bp, Zea mays
atgaactggggcacgcaggccacgcacccgctgccgcccaagatcgtggcgcagctcctcagggacaacggcatcaagaaggtgaagctgttcgacgccgaccagggcacgctcagcgcgctcgccggcaccggcatcgaggtcatggtcgccatccccaacgtcatgctcgacaccatgacggactacgacaccgccaaggagtgggtgcgccggaacgtgtcccgctacaacttcgacggcggcgtcaccatcaagtacgtggccgtgggcaacgagccgttccttgcggcctacaacggcacgttcgacaaggtgacgttcccggcgctgcagaacatccagaacgcgctgaacgaggccgggctcggcgacaccgtgaaggccaccgtcccgctgaacgccgacgtgtacatgtccccgaaggacaacccggtgccgtcggcggggcggtggcgcgccgacatcgccgacctgatgacgcagatggtgcagttcctgagcaacaacagcgcgcccttcacggtgaacatctacccgttcatcagcctgttcctgaacgacgacttccccgtggacttcgccttcttcgacggcggcgccgcgccgctggtggacccgggcagcggcgtgtcgtacaccaacgtgttcgacgccaacttcgacacctggtgggcggcgctcagtcggtggggggacgggggacatgccgtcgtggtggggcgagggtcggctggcccaacgacggggacaagcacgccaccaacgcgtacgcgcagcggttctacaacggcctgc

SEQ ID NO: 5620 - DNA, 972 bp, Zea mays
atggcggacggcggaggagaaggaggacctcctgcggcgtcggcggcgctcaaggaccaggggaatgagcagttcaaggcggggagctacctcaaggctgccgcgctctacacgcaggccatcaagctcgaccccgacaacgccaccctctacagcaaccgagctgcagcattcctgcagttggttaagcttagcaaagcgcttgctgatgcagagacaacagtcaggctgaagccacaatgggagaagggtcatttcaggaaaggttgtgttttggaggcaatggagcgctatgaagaggcgatagctgcatttcagatagctttgcagcacaattcacaaaatacagaagtctcgagaaaaatcaagaggctatctcagttggccagggaaaagaagcgagcccttgatgtagagaacatgcgttcaaatgttgacattgcaaagaacttagaatcactgaagactgagttggctacaaagtatggagatgcagaaacagggcagagtgtcttttctttcattgttaatgtggtagaatcagcagtaaaggtttggcatgatacaggaaaagtagatccaagggtccattttcttctcgatgatcagaagaccgatactgaaaaatatgccccagtagttaacattgacaaggcatttgagtcccccaacactcatgctgagtgcttcacatatctgcggcaatacgcggagaattgttctgcgaaggctgcttgtatggtggcacctaagagcatcatctcctacccacaggtctggaaagggcaagggtcgaggaagtggaagcttgaccagagcgacgggttcttcgtgcaattcgaggcaccggcgctgaggaagatatggtttgtgccaagcacaaaagagaagggacggacattgtgcaggagccctgaggccttggacatcggcatccatgaagtgctcccccgtatattcaaggaggcagct

SEQ ID NO: 5621 - DNA, 582 bp, Zea mays
atggtgcacgtcaacttctaccgcaactatggtaagacgttcaagaaaccaaggcgtccttatgagaaggagcgtcttgatgctgaactgaagctggttggtgagtatgggctgaggtgcaagcgtgagctttggagggtccagtatgcactgagcaggatccgtaatgctgcaaggcacttgctcacccttgacgagaagaacccccgtcgtatctttgagggtgaggcacttcttcgccgcatgaaccgctatgggctgcttgctgagggtcagaacaagcttgattatgttcttgccctcaccgctgagaacttcctcgcaaggcggcttcaaacacttgtcttcaaggctggcatggccaagtccattcaccatgctcgtgtcttgatcaagcagcgtcacatcagggttggcaggcaaattgtcaacgtcccatcattcatggtgagggtggagtctgagaagcacattgacttttcactgtcaagcccattcggtggaggccccgcaggaagggtgaagagaaagaatcagaagaaggcaagcggtggcggggatgctggtgatgaggatgaggag

SEQ ID NO: 5622 - DNA, 1146 bp, Zea mays
atgccgcaaccgcggtgggtggtcatcccataccctcctccacaccatcccatggtggccgcgccgccgccaccttctctgcagtttgtgaagcattttacgccgccgtcctcggtaacaccgccgccgccgactggatccggcgggaacgggggcgaggataaccggaccatctgggtgggcgacctgcagtactggatggacgaaaactatcttcacagctgcttcggctctagcggcgaggtggtgaatattaaagtcattcgcaatagacactcgggagtttctgagggttatggttttatagagttttatactcacgtttcagcagagaaggcactgcagaatttttctggtcacgtaatgcctaatactgaccgggcttttaagttaaactgggcatcatatagtatgggagaaaaacgctcggaaatttcgtctgatcactcgatatttgttggcgatttggctgttgatgttactgatgcgatgttgctggaacttttttctaacaaataccgatcggtgaaaggagctaaagttattattgatgcaaacacaggccgttctagaggctacggctttgttaggtttggagatgataatgacaaaattcatgcaatgactgaaatgaatggtgtttactgttccacaagaccaattcgtgtaggaccagcgactcctagaagatctcaaggtgattctggcacttctccaccaaggcaatctcatgttgactctactaacaggacggtatatgttggtgggcttgaccccaatgttagcgaagatgaactgaggaaagcatttgcaaaatatggtgatcttgcctctgtcaaaattccttttgggaaacaatgtgggtttgttcaatttgtaaacagagttgatgctgaagaagcactgcatgggttgaatggatcaactattgggaagcaggcagttcgactttcctggggccgcagccctgcaagtaaacagtctaggggtgattctggccaccggcgcaatggcaactgcaacggcatgtactacgggacaccattctacggtggatatggctacgcctccccgattccgcacccaaacatgtacgccgcggcctacgaagcctacccgtactatgggaaccagcagctagtgagc

SEQ ID NO: 5623 - DNA, 612 bp, Zea mays
atgttccacgtgtaccagcccatgccgatgccatccacggcggcggcccccgcgaaggcgggcaagaaggagggcggcaaggaccggcacagcaaggtgaacgggcgcgggcggcgcgtgcggatgccgatcgtgtgcgcggcgcgcgtgttccagctgacccgcgagctggggctcaagtcggacgggcagaccatcgagtggctgctccgccaggccgagccctccatcgtggccgccacgggctccggcaccaccccggccgtcttcgtctcctcctccgcgccgtccacgtcctcctcctcccactcccactaccagcagcagcagcagcagcagcaggccaccgtcgtcgtcctgggcaagcgcccgcgcgaggagggcggcgacgccgcggcggcgtccgtgccggcgttctgggcggcggcgccgcggacgacggcagcagcggacgccagctggggcttctcgccgctggaggcccagcaggcggcggcggggtacgtgcccatggcacaggcgcagcagcagcagcaccaccaccaccacctcaacctgctcgccgcgctctccggtgccgcgaggcgcgccgaggcggcggaggagacccga

SEQ ID NO: 5624 - DNA, 900 bp, Zea mays
atgccggccttcgactacacgccgccgccgtacgacgggccgcgcgccgaggagatcttccggaagcgcgctcagttcctcagcccatccctttttcatttctacgatcgcccattgaacatagtcgaaggaaagatgcagtacctatttgatgaggatggccgtcgttacctggatgctttcggtggcattgcaacagtttgttgtgggcactgccatccagatgttgttgaagccatagtaaaccaggcaaagcggatccagcactccacagttctatatctcaatcatgcaattgcagattttgccgaggcattggcttccaaaatgcctggtgatctgaaggttgttttcttcacaaattcaggcacggaggcaaatgagcttgcactgatgattgcacggctttacactggttgcaatgacattatctctcttaggaatggataccatgggaatgctgctggaacaatgggtgctactgctcaatccaattggaaattcaatgttgttcagacgggagtacaccatgcgcttaatccagaccccttcagaggtgcttttggttctgacggggagaaatacgccagagatgttcaggaaatcatcgaatttggaactacagggagagttggtgggttcatttcggaagccatacagggggttggtggaatagtggaactggcaccaggatacttgcccgtggcatacagtatggtaaggaaagccggtgggctctgcatcgccgacgaagttcaggcaggagtcgcgagaactggaagccacttctggggattcgaagggcatggtgtcatcccggacatagtcaccatggccaagggtatcgggaatggcatacccataggagctgtagtaacgacgccagagatcgctcaggtg

SEQ ID NO: 5625 - DNA, 450 bp, Zea mays
atgggatcggcggcgggcaggccggcggcggggtgcgggatcccggctgctcccatggcggcggagtcggcgtccttggcctcgtcccgcggcacgatgtcgacgaggaagtcgaagacctcggtgcgcgcgacggcggcggcgatgtcggacttctgcagcgtgcggcgcttgttctcctcggcgtgtgcccagccgcggtgggtgagctcgaggatgaacatctcgcaggcgcgggagaagacgacgggcgcctcggcggcgatcatgcgcacgtcctcgtcggccttcatgatcttcttgatgcgggcgagcggcaggttgtggttcttgaagtcggtggtggcctcgatctcgcggtattgctccgcccagaatagctgctgctggtgcgccgccgcggcgccctgctgcgaggaggggggcgccggcggcaggggaggaggaggg

SEQ ID NO: 5626 - DNA, 393 bp, Zea mays
atggatactaagctctcccatgctgagctgacacaccctgatgagcttgatgaggagtttgacacgttcccttcctccagaccagctgaaattgtaagaatgcgctatgacaggctgaggagcgttggaggtcgtgtgcaggctgtggttggggacctggcgacacaaggcgagagagcccatgctttgctgagctggagggaccctcgggccaccgccatcttcattttcttatccctggtgatcgccgttgtgctgtacgtgacgccgttccaggttttgatggtcatagccatgctttacctgctgcgacatccccggttccgcagcaggatgccctcagtgcctttcaacttctacaggagactgcctgccaagtctgatatgctcctt

SEQ ID NO: 5627 - DNA, 765 bp, Zea mays
atggccgtggcgtcggcggcgacgctcgtggccgcgcagtgcgtggaggcggccgagtccatcggcgccgagcgggagcacctggaggccgtggtcgggtcggccgtcaacgtcaggacgcccggagacatcgtcaccgtcaccgctgctgcggccaccgcgttgagaggcgcggccacgctgaaggcgagggctctgaaggaggtgtggaacatcgcggccgtgatcccggtagagaagggcgcggtcggcggcggcggcggcggcggaggaggagggcacaaccagaagcacggcgcgtccaagcagcagcagcagcatcgcaagctggagagcaacggcagcagcgtcagcgacgtgtcgctggaggaggagaacaacttcctcggcatctgcagccaggagcttctcgctcgcggcaccgagctcctcaaacgcacacggaaaggcgctctgcactggaaggtcgtatcggtgtacatcaaccggatgggcctggtgatgctgaagatgaagagccggcatgtggcggggacgatcacgaagaagaagaaaagcgtggtgatcgacgtgtgcagggacgtgccggcgtgggccgggcggcacctgctggaggacggcgagcaccggcggtacttcggcctgcggaccgcggagcaccgggtgatcgagttcgagtgcggcagccagcgggagcacgagatgtggatcaagggcgtggcgcggctgctgagcatcgccggcgagcggaggcgcctggtggcg

SEQ ID NO: 5628 - DNA, 627 bp, Zea mays
atgaagcagatgtccagtgccaagtttgttgagtcagcggaggcgcacttccgcatgaatctcgaccccaagtacaatgaccagcagctccgggccacggtgaatttgcccaagggaacaggccagtcggtgaagattgcggttctcacacaaggtgagaagatagatgaagctagagctgccggagctgatatcgtaggtggagaagatttgattgaacaaataaaaggaggatttatggagtttgacaaattgattgcatcacctgatatgatgcctaaggttgcgggcttaggtaagattctaggaccaagaggactgatgcctaaccccaaagctggcactgtttcttcaaatattactcaggctatagaagagttcaagaaagggaaggttgaatacagggttgataaatcaggaattgttcatattccatttggcaaggttgactttccagaggaagatctcattgcaaacttcatgtctgttgttcgctctgttgagaggaacaagccatctggtgctaaggggatatactggaaaacggcgtacttgtgctcatccatgggaccttctatcaagctaaacataaaagaaatgcttgactatggtttggaatcatctgac

SEQ ID NO: 5629 - DNA, 198 bp, Zea mays
atgagatccaagacgggcgcagcggggtgccgcccagcgacttccccaagtggctgccggccacccagcggaggctcctgcagcagacccagaagcctaacacggtggtcgcccaggacgggagcggcgacttcaagaccatcaccgaggccatcaccgccgtgcccaacaccttcgaggggcgcttcgtcatctacg

SEQ ID NO: 5630 - DNA, 273 bp, Zea mays
atggggtggaacggcatgccgggcagcgggagccccgggatggcgggcatgccgccggcgccgggggtcgggaacagcgggaacgacggcaaggtcgacggcggcagccaccacctcatgctgtggctgccggcggcggcggcggcgttccgggacgtcaaaggctccgtggtcggccccgcggcggcagtgacggtgacggtggtcgcggcggggacggccgtcgcgcggccgagctctggctcgaactccacgtggctggtatcgttctcg

SEQ ID NO: 5631 - DNA, 1134 bp, Zea mays
atgggcgctctgttccacgcgctgcccgcgcacgtcgagcagctgctccgccgcgtcgtcgtcgaacccagagccacgttcctcgtcgccgacaccttcttcgtgtggcccgccactctggccaggcgcctcggcatcgcgtatgtgtcgttctggaccgagccggcgctcatcttcaacctctactaccacatcgacttgctcacccagaacggacactttagatgcaacgagcctcgcaaggacacgatcacctacatcccgggcgtggcggccatcgagccgagcgagctcatgtcgtacctgcaggagacggacaccacctccatcgtccaccgcatcatcttcaaggcgttcgacgaggcccgcggcgccgactacgtgctctgcaacaccgtggaggagctggagccgtcgaccatcgcggcgctgcgcgcctacaggcccttctacgccgtggggcccatcctcccggcgggcttcgcgcgcagcgccgtggccacgtccatgtgggcggagtccgactgctcccggtggctggacgcgcagccggtcgggtccgtgctctacatctccttcggcagctacgcgcacgtgaccaagcaggagctgcgcgagatcgcgggcggcgtgctggccagcggcgcccggttcctgtgggtgatgcgcccggacatcgtgagctccgacgacccggacccgctgcccgaggggttcgccgaggccgcggcggggcgcggcctggtggtccagtggtgctgccaggtggaggtgctctcccacgccgccgtcggcgccttcctcacgcactgcggctggaactccgtcctcgagagcgtgtgggcgggcgtgcccatgctgtgcttcccgctgctcacggaccagctcaccaaccgccgcctcgtcgcgcgggagtggcgtgccggcgtgtccgtcggagaccgcggcgcggtgcgcgccgacgaggtgagggcgcggattgaagcggtcatgggcggggaagacggcctcaagctcagggagcaggtgaagaagctcaggggcacactcgaggctgccgtggcgtccggtggttcgtcgcggcacaacttcgacgagttcgtcgaggagctgaagcgccggtgcggaggccgc

SEQ ID NO: 5632 - DNA, 993 bp, Zea mays
atgggttcccgctacgaggtggaggtcaccgtcggctccgcccgggacctcaagaacgtcaactggcgcaacggcgacctcaagccctacgccgtggtgtggatcgactccggcagcaagtgctcgacccgcgtcgacctcgacaacggcgagagcccggcgtgggacgagaagctgctcgtcccgctcccgcccacctcccgcctcgacgacgccgtcctctacgtcgacgtcgtccacgccaacgccgcccagggcgtcaagccgctcgtcggctccgcgcgcctcccgctccgcgacgtcctcgacgacgccggggtcgggggcaaggcctcgcgcagcctccgcctcaagcgcccctcgggccgcccccacggccgcctcgacgtccgcgtcgccgtcaaggagccgtccaggtactacgaccccaacccctacccggcccccgcggcctacgccaacacgggcggcggcacccgtgacccctacggctcgtccgctgctgctgccggcggctactacggctccggaggcggatacggttccggtggtggcgcctacggtggcggcgcctacggcgccgcgcagccttacaccgcagcgcccccggcggggtacccttccacctacggcgccgcgccgccgcctcagccagcggcagcgtacggcgctcctcctgccgctgcatacggcgctcctcctgtcgccgccaccgccgcgtacggaaccggcgccgttgcttccgacgggaagaagaagaacaagatggggatggggacggggctggcagtgggcgcggcggcgggcgtgctcggagggctggcgctggccggcggggcgagctacctggaggacaagttcgaggagcgcgtgtcggagcgggtggaggacaacctggagagggaggagtcgtacggcggcggcggcggcggctacgggggtggctacgacgactatggcggcaacgacgactatggcggcgacgacgactac

SEQ ID NO: 5633 - DNA, 975 bp, Zea mays
atgcagcaggcgcagtcccatccgcagcagctgtcgcagcaggccatgtcccgcttcccctccaacatcgacgctcacctccgccctctagggccgcttcgcttccaacagccccagccccagccccagccgtcccactcccagggtccatctcagtcgccgtcgcaggccacgcagcaggcgtcaccccagcagcagcagcagcaggcggcggcggcggcggcagcggcgcaggcacaagcacaggcccaggcccaggcggcacgggtacgaagccccgagatggagatggcgctgcaggacgccatgcgggtctgcaatccggacgtcaagacgcccttccagtccatcgaggacgctgtcaacaggttattaccttaccatgttgttgccgactatgaggctgaagaagatgacaggatccttgatagcgacacaacaggccagatcccttctcgcctgcagcaatgggaccataatattctggtgaagattgctgagttcacgacaacttttgacaagcaagtattggcatataacataatgaccaagaaaagggccatcggtgagttcaggtcggaggagcggctcatgctggagcaagccttattgcaggaggaaaagcaagctatgctgggactgagggcagagatggagtcgagagagaaagctggtcgcgaggctgccgaagtgaagatgcgtttggcaatggagcatgctcgtgctgaggcacaagctcactctgagatgatgaatcatggtcctataagggccagtgctgttgcttcgcaaggggaggatggtccgagtcatgacatggtgcaagaacatggcgaagatgggtggggaaattctcagagggatgatgaagatccatcggaggatttcctcaacgatgagaacgaacctgagaatgggaactcagatgggcaggaggactggcgcagatctggggagtttgatctcaactctagg

SEQ ID NO: 5634 - DNA, 333 bp, Zea mays
atgacgacctccgcgccgacccggcgtaccagagctactactactccaatgcgcacctcaacccccgcctcccgccgccgctcctgtccaaggaggactggcgctcctcgcaccaccgcctccgctccgcggccttcggcgggatcggggacggcaggaggcagcagcagccggctgcccaagggacggtcggcctgcccgggatcgatcttgcccgccagaggagcttctccaccgtctttcaggaggattcgtatcagcgtgatatggataggcagactgccagccacaatagtagtgaatcattatgttcttctggaatacagtatggtc

SEQ ID NO: 5635 - DNA, 549 bp, Zea mays
atgaacacgttgatatcatttctgtggtggatcattggattctactggatattctcaggtggggaggtgctcgagcacggcgctccaaggctgtattggttaaccattgtgtttctggccttcgatgtgttttttgctgtgttttgtgttgctgtggcctgtttcattgggattgcactgtgttgctgcttgccttgtgtcattgctattctgtatgctctggctggccaggagggtgcatcagatgcagatattagtgttcttctgagatatagatattctgatccaagcgaagatggtgagaagggggtcgatgaaggactgatgatccctatcctgaataatagtggaatgtcaacaagtgagcgtattctccttcgcgaggatgctgaatgctgtatctgtctatcatcatatgaagatggagctgagttatctgctctcccctgcaatcatcacttccactggccttgtattaccaaatggctgcgcatgaatgcgacgtgtccactctgcaagtataacattctcaaaggcagtgacagtgca

SEQ ID NO: 5636 - DNA, 525 bp, Zea mays
atggcgagttcccggaggagctccgggctctcctccggtgccgcagcgctgggcattgcgctgctggtcctggccgccagcgcgggcaacgccggcgcgtcgtactacggggagatgaggcggcagttcctggcgcagcagaacgcggcgcgcgcgtcgctgggcctggcgccgctggcgtgggacgagcgcgtggcggcgtacgcgcgggcgtacgcggagtcgcggcgcggggactgcgcgctggcgcactcggcggggccctacggcgagaacctcttctggggcagcggcaccggctgggcgcccgcgcaggccgtcgccgcctggctctccgagcgcccccgctacgactactggaccaacagctgctacggcggctccatgtgcggccactacacccagatcatgtggcggagcacccgacgcgtcggatgcgccatggtcgcttgctacggcggcaggggcaccttcatcacctgcaactacgacccgccgggcaactacgtcggcctgcgcccgtac

SEQ ID NO: 5637 - DNA, 285 bp, Zea mays
atgccgggcgccgacgtcgaccaggacgagccggaaacggcggcgcagctgatcatcgtgtacggagggcgggcgctggtgctcgacgacgtcgcggcggacaaggcggcggacctgctgcgcctcgccgcggcggcggcggcgcgaggaggcacagagcagccgctctgctcgctcgccgacctaccccgtggcccggaaggcgtcgctgcagcggttcatggagaagcgcaaggacagggtcgccgcccgcgcggagccgtaccgccggcgccgacccgtcgg

SEQ ID NO: 5638 - DNA, 384 bp, Zea mays
atgttgtgtatggtggagctgctgcggcggcagcagcgggcatgtggtggtggtggagggcggctgcggcggggagcgggaagttggtcctggccttgggcccgcgcagcatccgcgctgcggcgtcgtaggcacgggcggcgtcctcggcggagtcgaatgtgccgagccagacgcgcgccttcttcgccgggtcccggatctccgctgcgtaccggccccacggcctcttccgcaccccgcggaaccgcaactccacgtcaccgtccgcctcagccgccgccacgccgcggcgccgcatgccgccggatcagcggagcgcgagggtgcgggaacgaacggggatcggagaattggtattggaagcgagtatttgggaatccg

SEQ ID NO: 5639 - DNA, 441 bp, Zea mays
atgatctacgcgcagtggaagtcgttggggcagttcttgccgcagttgttgaggatgaggctgaggtcgatggggaggttaaggttgatgccgaggatgttggccttgacggcggtgcagaggcagacggcggcctccaggtcgacgagcccgtccagcagcgagcagcacggctcgtacggcggcgagcctaccttggccttcaccaggcccagcacgttggcgcacacgcccagcttcagcgcgttcctggggcacgacccgtggccgtggtggccgccgggcgtcggcggctttggggccggcggcagcggtggcggtgggcagtcggtcgcgctcgcgctcgccacggcggcaaggataaccaggctgacagccagctggaggagcgccgctctcgcagccatggtcgaacgagtgagctgcttgcacttgcacacg

SEQ ID NO: 5640 - DNA, 1029 bp, Zea mays
atgagggggcagacagagacaggccggtggcgaggaggcgacggcgttgcggcgtggtgggtggccgtggtggccctgcagctgggccattcgctgagccgcgcgcgggcggggctgctggagtccaacccgggccttgcctacaacttctaccagagcagctgccccagcgcggagtccatcgtccgcagcgtcacctgggcgcaggtcgccgccgaccccgcgctcccggcccgcctcctccgcctccacttccatgactgcttcgtcaagggctgcgacgcgtcgatcctgctggacaacgcgcagagcgagaagacggcggcgccgaacctgtcggtgggcgggtacgaggcgatcgacgcgatcaaggcgcaggtggagaaggcgtgcccgggggtggtgtcgtgcgcggacatcgtggcgctggcggcgcgcgacgcggtgtcgtaccagttcggggcgtcgctgtggcagtggagacgggccggcgggacggcggggcccccgtcgctggcgtccgacgcgttgggggcgctaccgtcgcccttcgcagggttcggcggcctgctggcgggcttcgccagtcgcgggctcaacctgacggacctggtggcgctgtcgggggcgcacaccatcggcgtggccagctgctccagcgtcaccccgcgcctgtaccaggggaacgccaccagcgtcgacccgctgctggactccgcctacgcccgcgcgctcatgtcgtcgtgccccaacccgtcgcctgcgtccgccaccgtgggcctggacggcggctcgccggccaggttcgacagcgggttctacgcccgggtgcgccagggccagggcacgctggcctccgacgccgcgctggcgcagaacgccgccgccgcgcagctcatggccgacctctccacccccgccagcttttacgccgccttttccatgtccatgaagaagatgggccgcgtcgacgtgctcaccggcaccaacggccagatcaggaagcagtgccgccagatcaacacatct

SEQ ID NO: 5641 - DNA, 594 bp, Zea mays
atggcggcggcggcagcaggcaacggaggaggcggcacctcggccggccaagacagctgcgtcaccgcggcgccagctggccgcggcgcgcgtagcaagcggtcctcccgcgcgcccgcggcggcggcgtggcactccctcgtgtcgcgcccaccgtcgcagccgtcgccatcctcgtcgtcctgctcgtcttcggacttcccgtcgtcgtccaacaggccagcgcgcggcaggaagagcccggggcccggcggggacgcggtggcgggctcggacggcggcgtgcggcggtgcacgcactgcgcgtcggagaagacgccgcagtggaggacggggccgctgggccccaagaccctgtgcaacgcgtgcggcgtgcgcttcaagtccgggcggctcgtgcccgagtaccgccctgcggccagccccaccttcgtgctcacgcagcactccaactcgcaccgcaaggtcatggagctgcgccgccagaaggagctcatcctcatccgcggaagccaccgcgacgccgccgcggctgcaggagcaggatccgccgggccgaggccggagctcatgttccgcgactacggcgtgtgt

SEQ ID NO: 5642 - DNA, 525 bp, Zea mays
atggaggcgatggcgcaggtgaaggagatgatctaccgcgcggcggccatgcggcccgtgaacctcgggcccgaggccgtcggcgcggcgggggcgggcgcggagaggccccggcggaagaacgtgcgcatctcgagcgacccgcagacggtggcggcgcggctgcggcgcgagcgcgtgagcgagcgcctgcgcgtgctgcagaagctggtcccggggggcagcaagatggacacggcgtccatgctcgacgaggcggccagctacctcaagttcctcaagtcccaggtccaggcgctggaaaccctaggcacgacgacggcgaccaacgccaacagcagcgcgagcgccaccaccagcaggagcagcgcggcgagcaggtcgccgcagtacaactattacggcggcggcggcaataataataatcctgccggctttcttggattcagtaacgttatttctccggctgggtatgtaaatccgggtggatcgtcgtcgaatactggcagcaacaaactgctgttt

SEQ ID NO: 5643 - DNA, 648 bp, Zea mays
atggatctgttggagcggaatattaagacggagacggaggagacgcgcaaggaacaggagcgtaaggaggaggaggcggaggcggaggcggaggcgggggagaggaagacccaggagccgccgcagcaaggccagggcctcagcctctcactcgccaacggcagtggcaggtctggaatgttgccgatgtcgaacgtgtccgctaatccttcacagcttacaattttctatggcggatcagtatgtgtgtatgactcagtgccaccggaaaaggctcaagcaatcatgcttatagctgcagctgcagcggcagcggcagctaccaaaagcagtgctgcccctactgttaagcctccaatggtgcctgcagccactgttgccccagcagctgtcgtttctcctgtgcttacacggtctccatcactgcagagcacttctgtagcaactgggcaacctcaggttgttgctgaacctagctcgatatgcaaacttcaggctgatctccccattgccaggaggcactctcttcagcgtttccttgagaaacgccgtgacagggtcgtgagcaaagctccatacagcaccgccaagtcgtccgatggcatggagtcaccgaggattgaggtgacagcggagggcaaggcccag

SEQ ID NO: 5644 - DNA, 678 bp, Zea mays
atggggcttgactattacaagatcctaggcgtcgacaagggcgccaccgatgacgacctcaagaaggcctaccgcaagctcgccatgaaatggcaccccgacaagaaccccaacaacaagaaggaggccgagaacaagttcaagcagatctcggaggcgtacgaggtgctgagcgacccgcagaagcgcgcggtgtacgaccagtacggcgaggagggtcttaaggggcaggtgccgccgccgggcgccggcggggcggggcccggcggcgcaaccttcttctccaccggcggcgacgggccgacggtgttccggttcaacccgcgcaacgcggaggacatcttcgccgagttcttcggcggctccagccccttcggcggcatgggcggcggtggcatgggcggcagcggcatgggcggtgggatgcccggcatgcggagcggcggtacgaggttctcctcctccatcttcggggacgacatattcggctctgcgttcggcggcggcccggacgggcacggcatgcacgccggcgggcgggccgtgaaggcgccggccatagagcggaagctgccgtgcagcctcgaggagctgtacaagggcaccaccaagaagatgaagatctccagggaaatctctgacccccagtgggaagacgatccccagtggaagagatcc

SEQ ID NO: 5645 - DNA, 1473 bp, Zea mays
atgcggcgcggggtgccggcccccgcggagctcacggccaacgtgctgggccacccgaccccgagcctccgcgaccactacgcgctcggccgcaagctggggcaggggcagttcggcaccacctacctctgcacggacctcgccacgggcgtggactacgcctgcaagagtatagccaagcggaagctcatcaccaaggaggatgtcgaggacgtgcgccgcgagatccagattatgcaccacctggctggccaccggaacgtcgtcgccatcaagggcgcgtacgaggaccagctgtacgtccacatcgttatggagttctgcgcgggcggggagctcttcgaccgtatcatacagcgggggcattacagcgagcgcaaggccgcggagctcacgcgcattatcgttggggtcgtcgaggcttgccactcgctcggggtaatgcacagggatctcaagccagagaacttcctgctctcgaacaaggatgacgatatgtcgctcaaggccatcgacttcggcctctccgtgttcttcaagcctggtcaaatttttaccgatgttgtgggaagcccttactatgtagctccagaagtgctgcgcaaacgatatggaccagaagctgatgtgtggacagctggagttattctttacatacttctatgtggtgtaccgccattttgggcagagacacagcaaggaattttcgatgctgttctgaaaggtgtaattgattttgatttggatccctggcctgtgatctctgagagtgcgaaggatcttataaggagaatgctgaatcctatcccatcagagcgcctaacagcacatgaagttctatgtcatccatggatttgtgaccatggagttgctcctgatcgtcctcttgatccagctgtcctgtcacgcatcaagcagttctcagcgatgaacaagttaaagaagatggctttgcaggtaattgctgagagcctttcggaggaggagattgcagggctgaaggaaatgttcatggcaatggatacagataatagcggtgcaattacatatgatgaactgaaggaaggattgagaaagtatggctccacattaaaggatactgaaattcgtgatctcatggaggcggcggatatagacaacagtgggaccattgattatatagaattcattgctgctacattgcacctcaataaactggaacgtgaggaacatctagttgcagcattttcgtattttgacaaagatggcagtggttacattactgtggatgagcttcaacaagcgtgcaaagagcataacatgccagctgcttttcttgatgatgtgattaaagaagctgaccaggataatgatgggcgcattgattacggggaatttgttgccatgatgacaaagggcaatatgggagttgggaggagaacgatgagaaacagcttgaacataagcatgagggatacgcctgctggtgccctc

SEQ ID NO: 5646 - DNA, 654 bp, Zea mays
atggctggacacgcgccggcgagggacaagaccaccaccggcttcgccgctacgtgcagcctgctgagccagtttctcaaggagaagaagggcggcctgcagggcctcggcggcctcgccatggcgccggcgccggcagctggagcaggggctttccggccgccgaccaccatgaacttgctgtccgcgctcgacgcggccaaggccaccgtcggggagccagaaggccatggccaacgcaccggcgggaatccaagggaggcagctggggaggaggcgcagcagctgaccatcttctacggcgggaaagtggtcgtcttcgacaggttcccctccgccaaggtcaaggacctgctgcagatcgtgagcccgccgggggccgacgccgtggtggacggtgccggtgccggtgccgctgtccctacgcagaacctgcctaggccttcacacgacagtctctctgccgatctgccgatcgcgaggcggaactcgctgcacaggttcctcgagaagagaaaggacaggataaccgcaaaggcgccgtaccaagtcaacagttccgtcggcgctgaggcgtccaaggcggagaaaccctggctgggtctgggccaggaacaggaaggaagcgacggtcgtcaagcaggagaggagatg

SEQ ID NO: 5647 - DNA, 741 bp, Zea mays
atggcggcggcggcggcgacggcgaccacgacctctccggcgagggcttcgtggcggcctacggttcccgcgacctcggcatcggcagcaggagtctgcttccgtgttggagcgaagcgcttcagtccagggctccgaacggcaagcacctgtcggcaccgacaccgaggcagaacaaggctcacaacagctcacgtcaagagcggggaagccgaggggcgtccaagcacggaggagagcgcaactggcatcggcggcccggacgaggactccttgcggcgcgagctcgaaaccgcgatcgaggaggaggactacgcgcgcgccgcggcgctccgggacgagctgcgcgtgctccaggaggactgccgggccgcggtgctggcggcgaacgcgcggttctacgccgcgttcaaggacggcgacctggcggcgatgcgccgggcctgggccaggggcgaccacgtctacgtggtgcacccgtcggcggggaggatctccgggtacgagatggtgatgcagagctgggagatggtgtgcgacgccggctacgagttcccgctgcaggtggacctgcaggacgtggaggtgcgcgtgcggggcggcgtcggctacgtcacctgcctggagatggtcaggaccaaggggagcagcagctggggcaagcagctggccaccaatgtgttcgaggaggtggacggcgagtggctcatgtgcgtccaccatgcctcgcacttcgatgag

SEQ ID NO: 5648 - DNA, 441 bp, Zea mays
atgcctgcctcgccgcctaatcggatcgcccaacaacagtcacctagagcgggcttggcttattaccaggcgctggtctccctgtccctccgcggcgggatctgcgacggcgacagcggcgactcctcgctggcgctgctccgcgagtccccgcgccagtcgtcctgcacctgcgccgcgaactgcaggttccacagcacgtcctccaccgacggccgctgctccgcctccttggccaggcagcgcaggcagatctccatcaccgtccgcgccgactcgtcggagcacgcccggctcaccgcctggtccaccagcgccctccgccgccccgggctctccgacgtcagcgccgactgcagctgctccttcatgacctccacctcgtgtatggacgtgatgggcctcccggtcacgacctcgagcaggatcacgccgaaatcg

SEQ ID NO: 5649 - DNA, 453 bp, Zea mays
atgcgccgaagggcgaatccggagcgccgctttgcgggcgacggggacgacggcgcggagctggactcgctgcggggcgacgtgacgacggacagcgccgccggccgccgcagcatggtcaagctccgcgtcacggcgcccggaggcggcgcggagcccgccgccgccgccgccgccaccgccgccgacgacgacgacgagggggagaaggaggcgtacttgcggagcttgccgaggccggagtccgggcgcggcccggccaccgtgtcgtcccacagctggttcaggagccccatatatgcaccggtgcgtgcgcgtcctacgtacgtgcgaagtggccggccggcgacggcgtggtgcgcgttttgcttcgagagcgatgctcttgctctgtttcctttggttctcttgtttgatgttttcgttgtccttggggcgagaggaagagaggcg

SEQ ID NO: 5650 - DNA, 963 bp, Zea mays
atgtcatttgctaagctgaacgttcttcattggcatatcatcgatgagcaatcctttccattggaggtgccaacatatccaaacctttggaaaggttcatactccaaatgggagcgctacaccgtggaagatgcacatgatattgtcaactacgctaagaaaagaggtatcaatgtgatggcagaaattgacgtgcctggtcatgcagaatcatggggaaatggatacccaaagctctggccttctcccatttgtacagagccattagatgtctctagtgatttcacatttgaagtaatttttggaattttgtctgatatgaggaaaatctttccattcgggctgtttcacttgggtggtgatgaagtatacacagggtgctggaacacaacgcctcacgtgcggcagtggatggacgagcgcaaaatgaccacgaaggacgcttacaaatacttcgttctgaaggcccaggagctggcgatcaagctgaactggactcccgtgaactgggaagaaaccttcaactcgttcgaagaaaacctcaatccactgacggttgtgcacaactggctggggcccggagtctgcccaaaggttgtggccaagggtttcagatgcataatgagcaaccaaggcgtctggtacctggaccacctcgacgtcccctgggaggacgtctacagcggcagagcgtctgtggagccagctggaggccatatccgcccaggacgtcgagacgaccgtgctgtcacggctacaccgcttcaggtgcctgctgaaccaccgtggggtcgccgcggctcctgtcacgaactactacgctcggaggccgccggtcggcccgggttcgtgcttcgttcagtaaagcaagcagccaagcaggaaggtaccctcctacccacgccacgaggtgctctgccttcgtgtaccatatctgtgtgtaatccacggaaacaatctgta

SEQ ID NO: 5651 - DNA, 609 bp, Zea mays
atgagtctccctcgccgccgccaccttgtcctgctcgcctgcctcctggtcttcctcgtcttcgccgcgtccgcgtcgacgagttccgccgaggtggccccgagcgtggcggtggacttcgtgcggcggtcgtgccggtcgacggagtacccgcgcgtgtgcgagagcacgctggtcccctgcgcggctggcgtggggcgcagcccgcgcctgctggcgcgagcggcgctggtggttggcgccgaccgcgcgcgcaactgctcctcctacatccgcggcggcggcggcggcgcgatgaaggactgcgcggagctggcgcgcgacgcggaggagcggctgcggcagtccgcggcagagatggagcggatgggccgtgccggcacaccgcgcttcgcttggtccctcagcaacgtccagacctgggccagcgccgcgctcaccgacacctccacctgcctcgactccctcgcccagcagtcccgcggtggcaaggacagcgacgacgccgtcagggtgaagaggagggtggtggccgtcgcgcaggccaccagcaacgcgctcgggctcgtcaacaggctccagccggcgccgcaccggcggcgtctcctg

SEQ ID NO: 5652 - DNA, 1194 bp, Zea mays
atggcgctttataatgggcgggatttgtgtttcagaaatatacgtttttcctcggggagaacttgcttaattttggttgctgattttttgccagatgggcgatatgttagcatgatagataatccagatcagaggtttgcagctttcctatctccgcttacacttggtcgagtaaacattgcagttaactcagtctacatttcaaaggtcagcctagcaattgctgtgagatacagtttgtcaaggagagccttttcaattgcaccagatgcccctgaaatgttgttgcttgactatcccagtcaccagcgacgccttctaccacttctagcaaaagtatgtctgatgagcagtgctggcaattttatgaaaaatatgtatgtaaagagaactcctgaaatgagcaaagacatacacatttactctagtgctctgaaggcgacactaacttggcagaatatgattacgattcaggagtgtcgcgaggcctgtggaggtcaaggtctaaagactgagaaccgcataggaattttcaaatctgaatttgatgtccagtccacatttgagggtgataacaatgtgctaatgcagcaggtaagcaaagcgctttatgctgaatttttgggtgcacaaaagaagcagcagccattcaagggattgggtttggaacacttaaatggctcgagccctgttattcctgataagctgacaagtagcatattaaggagctccaagttccagatggacctgttctgcttaagggagagagatttactgaagcagtttgtagaggaggtttctctccatcttgcacaaggcgaaagcagagaaaaggctttgatgctgagttatcaagttgctgaagacttggctagagcgtttactgagcgtacgatcctccaaatatttttggaggatgagatgaatgttccttctggttccctaaaggaggtactgggcttgctgagatctctatatgtcatggtgaacatagatgaatccacatcttttctaagatacgggcatttatcacgtgacaatgtagcccttgtgcggaaagaagtcctgaaactgtgcagtgaactcaggccccatgcgcttgctgttgttagttctttcggaatccctgatgccttccttagtccacttgcttttgactggattgaggcaaatgcactgtcaaccgggagccac

SEQ ID NO: 5653 - DNA, 1071 bp, Zea mays
atggactccatggccagcgacgacagcaaccaaggagcagcagccaagccgaagccgaagccaccaccgctaccgctgtccgtgcgcctccagctggccgggctgacagcggccatcgacgccgtggagcgccgcgacgggacggtgaaccgctgcctgtacggcgtgatcgaccggctcctgagcgcgcgcgccagcccgcgcccggacgcctccggggtgcgctcctacgacgtgaccatggacgcgtcccgcggcatctgggcgcgcgtcttcgcgccggccgcggcggaccgcccgctccccgtggtggtgtacttccacggcggcggcttcgcgctcttctccccggccatcgggcccttcaacggcgtgtgccgccgcctctgcgccgcgctcggcgccgtcgtggtgtccgtcaactaccgcctggccccggagcaccgctggcccgccgcctacgacgacggcgtcgacgcgctgcgcttcctcgacgcccgcggcggcgtcccgggcctggacgacggcgtgcccgtcgacctcggcacctgcttcctggccggggagagcgcgggcggaaacatcgtgcaccacgtcgccaaccgctgggcggcggcgtggcagccgtccgcgcgggccctccgcgtcgcgggcgtcttccccgtgcagccctacttcggcggcgtggagcgcacgccgtcggagctggagctagagggcgtggcgcccgtggtcaacctcaggcgctccgacttctcgtggaccgcgttcctgcccgacggcgccacccgcgaccacccggccgcgcacgtcaccgacgacaacgccgacctcgccgacgacttcccgcccgccatggtcattatcggcggcttcgacccgctcatggactggcagcgacgctacgccgacgtgctgcgccggaaggggaaggaggtgctggtggccgagtacccaggcatgttccacggcttctacggcttcccggagctccccgaggctaccaaggtgctgcaggatatgaaggccttcgtcgacagccacatacccacgcccaagctcgccgacgcg

SEQ ID NO: 5654 - DNA, 309 bp, Zea mays
atgtccgggcgcggtaagggtggcaaggggctcggcaagggcggcgcgaagcgtcaccggaaggtgctgcgcgacaacatccagggcatcaccaagccggcgatccggcggctggcgaggaggggcggcgtcaagcgcatctcggggctcatctacgaggagacccgcggcgtgctcaagatcttcctcgagaacgtcatccgcgacgccgtcacctacactgagcacgcccgccgcaagaccgtcaccgccatggacgtcgtctacgcgctcaagcgccagggccgcaccctctacggcttcggcggc

SEQ ID NO: 5655 - DNA, 333 bp, Zea mays
atggcgttgcggaatgggaagcacagtgcggcgcccgctggcttccttgcactgccgcggctcggagacggcgcggcgaccggaagcgccggcttggcattggtgactggtcaccggcgcgtcaggctcctgcggcggcgccgggaaccgcgtggagaggtcgaaatcgacgagcatgatgtggccgctgtcctggatgaggacgttctccggcttgaggtcccggtacacgatgccgaggctgtgcaggtactcgagcgccagcaccagctccgcggcgaagaaccgtatgacggagtcggagaacatcttctcggtctgccgccgccgcag

SEQ ID NO: 5656 - DNA, 693 bp, Zea mays
atggtattgagcaggagtacaccctcctccagaaggacaccaactggccccttgggtggcccatcggtggcttccccggccctcaggggtccttactactgtggaatcggcgccgaaaagtcgttcggccgcgacatcgtggacgcccactacaaggcctgcttgtatgcgggcatcaacatcagtggcatcaacggggaggtgatgccagggcagtgggagttccaagtcgggccttccgtgggtatttcttcaggcgaccaggtctgggtcgctcgctacattcttgagaggatcacggagatcgccggtgtggtggtgacgttcgacccgaagccgatcccgggcgactggaacggcgccggcgcgcacaccaactacagcacggagtcgatgaggaaggagggcgggtacgaggtgatcaaggcggccatcgagaagctgaagctgcggcacagggagcacatcgcggcctacggcgagggcaacgagcgccggctcaccggcaggcacgagaccgccgacatcaacacgttcagctggggcgtggccaaccgcggcgcgtcggtgcgcgtgggccgggagacggagcagaacggcaagggctacttcgaggaccgccgcccggcgtccaacatggacccctacgtggtcacctccatgatcgccgagaccaccatcatctggaagccc

SEQ ID NO: 5657 - DNA, 429 bp, Zea mays
atgaccctcggtgctaaagtcataaggaaattggcagatgaggtgttctcaattgttggacgggatccacttattgaggtggccattgccctagaaaaggcagcgctgtcagacgaatattttatcaagaggaagctgtatccaaatgtggatttctactctgggctaatttatagggcaatgggattccctacagaattttttcctgtgctgtttgctattcctcgcatgggtggctggctagcgcattggaaagagtcactcgatgatcctgacactaagattataaggccccaacaggtatacaccggcttctggcttaggcactatacccccgtcagagaacgagtgctatcaagccagagtgaggaacttggtcaggttgccacctcaaacgcaactaggcgccgccgtgctggttctgccctg

SEQ ID NO: 5658 - DNA, 720 bp, Zea mays
atggtccaagatcgcggcgcacctgccaggcaggacggacaacgagatcaagaactactggcggacgcgggtgcagaagcacgccaagcagctcaactgcgacgtgaacagcaagcgcttcaaggacgccatgcgcttcctctggatgccacgcctagccgagcgcgccgcaacagccgcccaccagccgcagccgcagcacgtcgctgccgcctgcaacaacgtgctggtggcggcggcggcggcggccaacagcagcagctgctgctggtcctccccacgcagcagcgccgtcaccacggccgcctgcagcggcagctcctcctgcagctcgctcacgtccgagtccgcgcacaacgacgacgatggcgcccggccgcacgccaccgccgtgctggcggcggcggcggcggcgacgggcgacgacgactactggggcgctgtcacgacgactatgcagcaaaatcatcatcagcagcagcagcagaacgagcagttcgacttctggtccacggcgtccgcgctgcagcacctgactaccgccgccgccgaccaggacctcaccggctgggtgcagggcttctccgacgacggcatcctgtccggctcctcgtcggacagcctctggagcctcgacgacatctggaggatgcagtgacagtgagacgtatagtacggcgcgctgttgtctgtcgtttacgtcaatttttgcccgcgtgt

SEQ ID NO: 5659 - DNA, 1287 bp, Zea mays
atggcgggcgccgtgtcggcgctcttcctgctggacattaagggccgcgtcctcgtctggcgcgactatcgtggtgatgtctccgcgctccaggccgagcgcttcttcaccaagctcctcgacaaggagggcgactcggaagtccactcgcctgtggtctacgacgacgccggcgtcacgtacatgttcatccagcacaacaatgtcttcctcctcaccgctgctcgccagaactgcaacgcggccagcatcctcctcttcctccaccgtgtcgtagatgtgtttaagcactacttcgaggaactggaagaggagtcgctcagagataacttcgtcgttgtgtatgagttgctggatgagatgatggatttcgggtacccacaatacacggaggcgaagatcctaagtgagttcatcaagacagatgcgtacaggatggaggtcacacagcgtccacccatggccgtgacaaatgctgtgtcatggaggagcgaggggatccgttacaagaagaatgaagtcttcttggatgtagtagagagtgttaacattctagttaacagcaatgggcagattgtgagatcagatgtggttggggcactgaagatgcgaacatatttgagtggaatgcctgagtgcaaactcggcttgaatgatagggttcttttggaggctcaaggcagagcaactaaaggaaaagcgatagaccttgatgatatcaaatttcatcagtgtgtacgtttagctagattcgagaatgatagaactatatcgttcatacctcctgatggatcttttgatctaatgacatacaggcttagcactcaggtaaaacctcttatctgggtcgaagcacagattgagaaacattctagaagccgtatagaactcatggtgaaggcaaggagtcagttcaaggaaagaagcacagcaacaaatgttgaaattgaagtgcctgttccttcagatgccacaaacccaaatataagaacttcaatgggttctgctgcatatgctcctgagagagatgcaatggtctggaaagtaaaatcattccctggtggcaaggaatacatgtgcagagcagaatttagtcttcctagcataacagcggaagaaggggccccagaaaagaaggcaccaatacgagtgaaatttgagataccatatttcaccgtatcaggtattcaggtccgttatctgaagataattgaaaagagtggttaccaggcactcccctgggttagatatatcacgatggctggcgaatatgagctgagacttata

SEQ ID NO: 5660 - DNA, 1266 bp, Zea mays
atggagatacaaacttcagggaagcccattgatgtgctgatggagaaggttcttagcatgaacattctgtcttctgattactttaaggagctctataggttgaaaacctatcatgaggtcatcgatgagatctacaacactgtcaaacatgtggagccttggatgactggcaattgcagaggcccctccactgcattctgtcttctatacaagttctttaccatgaagcttactgtcaaacagatgcacggtttgttgaagcatcctgactccccacacattagagctattggtttcttgtatcttcggtatgttgcagacccaaaggttctttggatgtggtatgagccctatttgagggatgatgaggagttctcccccggatctaatggccgcaagacaaccatgggtgtttatgtgcgtgatcttatacttggacagtactactttgatagtcttctaccaagaattcctctcccagtaactcgtcagattacagccaatcttgaaaagatgaaattgcccactaagctttctggggcaactggagactccagtcgtcagggatcagaagatactgcacgccgtcctccttcagtgaaagcttctctgtcagtttcctttggacagcgtgctccacatcgggcttccaccagggattcatctccagttcgtcgaacagtcacccgtgatggtcatcgaagttcatactcaccatctcgtcgtagtggtagccgtgagggtcctgatcatgaccgttctgaccgggaactggatcattctagtcgtgaccgtgaaagagcccgggatcgttcaaaccgggatcggtatcattcaagccgagaccttgaccgtgacaaggatgccagagattatcatcggcatgagcgtgatagcagggatcgtgagtactacaggtccaggcattcagaagaaagacgggacgacagaagagatcatgaaagtagcaggcacaggcgctctagctctcgccacaggagcaggagtaggagccgaagcaggagcaggagtaggagcaggagaagccgcagccgaagcacgagcaggaggagcctgaatgagcagcgatccagcccattcagggatgcaaataaagagaaggcagccaccgtgtcgagcaacctagcaaagctgaaggacttgtacggtgacataactgcaaagaaggaagacagtgatgctgaaaagcttcaccgtgattcatgcgctgaggaggtcatcaggctgggaggccctcgatggagg

SEQ ID NO: 5661 - DNA, 606 bp, Zea mays
atgggtgttactcactgtaccattgcccatgcgcttgagaaaactaagtaccctaactccgacctctactggaagaagtttgaggatcactaccacttctcgtgccagttcaccactgacttgattgcaatgaaccatgccgacttcatcatcaccagtaccttccaagagatcgccggaaacaaggacaccgtcggccagtacgagtcacacatggcgttcacaatgcctggcctgtaccgcgttgtccacggcattgatgtgttcgaccccaagttcaacatcgtgtctcctggcgcggacctgtccatctacttcccgtacaccgagtcgcacaagaggctgacctcccttcacccggagattgaggagctcctgtacagccaaaccgagaacacggagcacaagttcgttctgaacgacaggaacaagccaatcatcttctccatggctcgtctcgaccgtgtgaagaacttgactgggctggtggagctgtacggccggaacaagcggctgcaggagctggtgaacctcgtggtcgtctgcggcgaccatggcaaccccttccaagggacaaggaggagcaggccgagtccaaaagatgtt

SEQ ID NO: 5662 - DNA, 588 bp, Zea mays
  misc_feature (553)..(553): n = any nucleotide
atgtcgcgcgcgcaggacgggatcctcaggtacatgctcaagatgatggaggtctgcaacgcgcagggcttcgtgtacggcatcatcccggagaacggcaagcccgtcaccggcgcctccgacaacctccgcgcctggtggaaggagaaggtccgcttcgaccgcaacgggcccgccgccgccgccaagtaccaggcagacaccgccgccgcgggaggcggggccgcggacgggtgcggaggcgccgacgcggaaggccagcatcactccctgcacgagctgcaggacaccacgctgggctcgctgctctccgcgctcatgcagcactgcgacccgccccagcgccggttcccgctcgagagaggcgtgccgccgccgtggtggccgctggccgccgtgcccgtacaagaagccgcacgacctcaagaaggcgtggaaggtgggcgtgctcagggccgtcatcaagcacatgtcgcccgacgtcgacaaggcgcgccgcctcgtccggcagtccaagtgcctgcaggagaggatgacgccagggagatggtcncgtgggtcgccgtgctcaggcaggaggaggagctc

SEQ ID NO: 5663 - DNA, 477 bp, Zea mays
atgtcgctgattcgccgtggaaacgcattcgaccccttctccctcgacctctgggaccccttcgagggcttcttccccttcggctccggcggcgtccgcagcctcgttccctcgttgccgcgcaccagctcggagaccgcggcatttgccggcgcgcggatcgactggaaggagacccccgaagcgcacgtgttcaaggcggacgtgccggggctgaggaaggaggaggtcaaggtggaggtcgaggacggcaacgtcctgcagatcagcggcgagcgcaacaaggagcacgaggagaagaacgacaggtggcaccgggtggagcgcagcagcggcaagttccttcgcaggttcagactgccggacaacgccaaggcagaccagatcaaggcgtccatggagaacggcgtgctcaccgtcaccgtgcccaaggaggaggccaagaaggccgacgtcaagaacgtccagatcaccggc

SEQ ID NO: 5664 - DNA, 477 bp, Zea mays
atggcggcggctgatgtggagtaccgttgcttcgtcggcgggcttgcctgggccaccagcaacgagtcgctggagaatgccttcgcctcctacggcgagatcctcgactccaaggtcatcaccgaccgggagacggggaggtcccgcggcttcggcttcgttaccttctcctccgagaactccatgctcgacgctatcgagaacatgaacggcaaggagctcgacggccgtaacatcaccgttaaccaggcccagtcccgtggcggtggcggtggcggcggtggctacggcggcggtcgcggcggcggcggcggttatggtggcgggcgccgtgacggcggttatggcggcggtggcggctacggcggtcggcgcgaaggtggcggcggcggctacggaggcggtggcggctacggcggtcggcgcgagggtggcggtggcggctacggcggcggtggcggcggcggctggagggac

SEQ ID NO: 5665 - DNA, 456 bp, Zea mays
atgtcgacgccggcgaggaagcggctgatgcgggacttcaggcgcctgcagcaggacccgcccgccgggatcagcggcgcgccgcacgacaacaacatcatgctctggaacgccgtcatattcgggccggatgatacgccgtgggacggtggcacgttcaagcttaccttgcagtttacagaagattacccaaacaagccaccaactgttcgatttgtctctaggatgtttcatccaaatatatatgctgatggaagcatctgtttggatatcctacagaaccagtggagtcctatatatgatgttgctgcaattttaacttctatccagtccctgctgtgtgatccaaacccaaactcccctgcaaactcagaagcagcaagactgttcagcgagaacaagcgggagtacaaccgcaaagtccgtgagatcgtggagcagagctggacagccgac

SEQ ID NO: 5666 - DNA, 177 bp, Zea mays
atgcccccgtcccggctcggcctggcgctccgccgcacctccttctcccacgcggcgcccccgtacgacgccgaggacatgagcaggctgcggtgcgaggcggaggagcgcgcgccgtcgtcggcgccgccgccgccgccggcggagaggtggaaggagcgcgagaggagggacggg

SEQ ID NO: 5667 - DNA, 417 bp, Zea mays
atggcgtattcggcacccgaacccagaggcggtgtggttgtgggcgctttcggtgacgtgcgaggtctggttcgccttctcctggcttctcgacagcctccccaagctctgccccatccaccgggccgccgacctggatgtccttgccgagcgcttcgagctgcccaccgcccgcaatcccaagggccactccgacctgcccggcatcgacgtcttcgtctccaccgccgacccggagaaggagccgccgctcgtcacagccaacaccatcctctccatcctcgcggccgactacccggtcgagaagctcgcctgctacctctccgacgacggcggcgcgctgctcaccttcgaagcgctcgccgagacagcaagcttcgctcgcacctgggtgccgttctgccgcaagcacggcgt

SEQ ID NO: 5668 - DNA, 675 bp, Zea mays
atgccgttcctgcggggggtggacgtgaaccgggcccctgccggggataccaggaggggtagctgcagcgaggacgacgaggagcctggcggcgcgtcgtcgtcgccaaacagcacgctctccagcagcctcagcgggaagcgcgcagctccggcgaggagcggcggagaggtggccgaccacaccccgagagccggaggcggcagcgacgacgaggactccggcggtgggtcgcgcaagaagctccgcctgtccaaggaccaggccgccgtcctcgaggagagcttcaaggagcataacacactcaaccccaagcagaaggcggcgctggcgaagcagctgaacctgaagccgcgtcaggtggaggtgtggttccagaaccgcagagccaggacgaagctgaagcagacggaggtggactgcgagttcctgaagcgctgctgcgagacgctgacggaggagaaccggcggctgcagcgggaggtggcggagctgcgcgtgctcaagctcgtggcgccgcaccactacgcgcgcatgccgccgcccaccacgctcaccatgtgcccctcctgcgagcgcctcgcctccgcgtccgcgtccgccgaccaggcgggccgtgcagggccctgctggggccctctccccgtgttcgtcgacggcccagcccggaggccg

SEQ ID NO: 5669 - DNA, 807 bp, Zea mays
atgacgcccgagaggaggatggcgatctgggcaatatacgtgtggtgcaggagaacggacgagctcgtggacggccccaacgcgtcccacatctcggcgctggcgctggaccggtgggagtcgcggctggaggacatcttcgccggccggccgtacgacatgctcgacgccgccctgtccgacaccgtcgccaggttccccgtcgacatccagccgttcagggacatgatcgaggggatgcgcatggacctgaagaagtcccggtacaggagcttcgacgagctgtacctctactgctactacgtggccggcaccgtggggctgatgagcgtcccggtgatgggcatctcgccggcgtccagggcggccaccgagacggtgtacaagggggcgctggcgctgggcctggcgaaccagctcaccaacatcctcagggacgtcggcgaggacgccaggaggggacggatctacctcccgcaggacgagctggagatggccggggctctccgacgccgacgtcctggacggccgcgtcaccgacgagtggaggggcttcatgaggggccagatcgcgagggccagagccttcttcaggcaggcggaggaaggcgccaccgagctcaaccaggagagccgatggccggtgtggtcttctctgctcctgtaccggcagatcctcgacgagatcgaggccaacgactacgacaacttcacccggagggcctacgttccgaagacgaagaagctgatggcgctgcccaaggcgtacctgagatcactggtggtgccctcctcctcttctcaggc

SEQ ID NO: 5670 - DNA, 423 bp, Zea mays
atgggctgcgaggaggaagagaggctgctgttcccgtccttcgtctttcccgagagcttcgcggaggccgccacccccggctccggtggtgagcagaagaaggctcggcagcgtcggaggcgcaagccgcggccggcggagggcggcgagggcgcggacgagcaggccaggaagcggcggctgagcgacgaccaggcgcggttcctggagctcagcttcaggaaggagcgcaagctggagacgccccgcaaggtgcagctggccgccgagctgggcctcgacgccaagcaggtggccgtctggttccagaaccgccgcgcccgccacaagagcaagctcatggagggaggagttctccaagctccgcgccgcgcacgacgccgtcgtcctccacaactgccacctcgagaccgaggtacctgc

SEQ ID NO: 5671 - DNA, 993 bp, Zea mays
atgaagaagtgcccatcggagctggagctggaggctttcctccgcggccgggaggacgccacggcggcggcggcggcggcggtggccgagcagaagcctacgcacgacatcgctgcgctggcgccgttcggcgccggtggcgtgttcccctccagcgatctgtccgccttcagcttcgctgactcgaacaccctcaatggaactggaaacatccataatcacctttggtcccataaccacaacgtcaggcatcccgcagtctccacgacgatcgagtcgcagtcgtcgatctgtgcagctgcagcagcaagtccaacatcggctaccaacctgtacctgaaagagagccaggctctgggcggcacgagtggttccgactccgacagcgattcgctgctggacatcgagggtggcccgtgcgagcagagcacgaacccacaggacgtgaagaggatgcgacggatggtgtcgaaccgtgagtctgctcgacggtccaggaagaggaagcaagcccacctagctgaccttgagacacaggtcgaccagctgcgaggcgagaacgcgtcgctcttcaagcagctgacggacgccaaccagcagttcacgaccgcggtcacggacaacaggatcctcaagtcggacgtggaggccctcagagtcaaggtgaagctggcggaggacatggtggcgcgcggcgcgctgtcgtgcgggctgggcagcctggggctgtcgccggcgctgaacccgcggcaggcgtgccgcggccccgacgtgctgtccgtgtccggcctggacttccccggcgccgacgacgcctgcttcacggggctgtccccggcggagcagctgcagctccagagctcccccctgcagagcatcgccgccagcctcgagagcctggacaaccggatggccagcgaggtcaccagctgcggggggcccggcgtcgacgtctggccgtgggaccaccactccaacggcggcctgtccaag

SEQ ID NO: 5672 - DNA, 408 bp, Zea mays
atggcccgcacgaagcagacggcgaggaagtccaccggcggcaaggcgccgaggaagcagctggcgactaaggcggcccgcaagtctgcccctgcgaccggcggagtgaagaagccccaccgcttccgccccggcaccgtcgcgctccgggagatccgcaagtaccagaagagcacggagctgctgatccgcaagctgccgttccagcgcctggtgcgggagatcgcgcaggacttcaagaccgacctacgcttccagagctctgctgtctccgcgctgcaggaggcggctgaggcctaccttgtcgggctcttcgaggacaccaacctctgcgccatccacgccaagcgcgtcaccatcatgcccaaggacatccagcttgcccgccgcatccgcggggagagggcc

SEQ ID NO: 5673 - DNA, 387 bp, Zea mays
atgcagatctttgtgaagacgctgacagggaagaccatcaccctcgaggtcgagagcagcgacaccatcgacaatgtcaaggccaagatccaggacaaggaagggatcccgccggaccagcagcggctgatctttgccgggaagcagctggaggatggccgcacccttgcggactataacatccaaaaggagtctacgctccacctcgtgctcaggctccgcggtggcatcattgagccctcgctgcaggcgctcgctcgcaagtacaaccaggacaagatgatctgccgcaaatgctatgcacggctgcaccctagggctgtcaactgccgcaagaagaagtgtggtcacagcaaccagctgagggccaagaagaagatcaagaac

SEQ ID NO: 5674 - DNA, 387 bp, Zea mays
atgcagatcttcgtgaagacgctgacagggaagatcatcaccctcgaggtcgagagcagcggcaccatcgacaatgtcaaggccaagatccaggacaaggaagggatcccgccggaccagcagcggctgatctttgccgggaagcagctggaggatggccgcacccttgcggactataacatccaaaaggagtctacgcttcacctcgtgcttaggctccgcggtggcatcattgagccctcgctgcaggcgctcgctcgcaagtacaaccaggacaagatgatctgccgcaaatgctatgcacgactgcaccctagggctgtcaactgccgcaagaagaagtgtggtcacagcaaccagctgagggccaagaagaagatcaagaac

SEQ ID NO: 5675 - DNA, 531 bp, Zea mays
atgtcgtccgcgccgagcaccacggcgtccaccatcgcagcctctatccacacgccgttctcctcgggtccccgcggggcccgccttccggccgcgctccgcctctcgctcgctcagctccggtcggccggatgccgcgcggcgccaggtcgcctcgctcgccctcgcgcgcgcgttcggtgcggcgcggcggccaggttcattgggcagggcgagttccccgcggaggtgctggagtcggagctgcccgtgctcgtggacttcgtcgccgactggtgcgggccgtgccgcctcatcgcgcccgtcgtcgattgggcctccgaggaatatgctgggcgattaaaaattgtcaagattgatcatgatgccaatccacagctgattgaagagtacaaggtttatggtctcccgactttgattctcttcaaggatgtccaagaggtgccaggcagccgacgagaaggggcaatgataaaagacaagttcaaggaatacctggaacctctgttgactacaattacaacagccgct

SEQ ID NO: 5676 - DNA, 1137 bp, Zea mays
atgaacaccaccgacgtcggcaagcagttcaccatgtccgaggtgcgcaagcacgcgtcgcaggagtcggcgtggatcgtcgtgcacggccacgtctacgactgcaccaagttcctcaaggaccacccgggcggcgccgacagcatcctcatcaacgccggtaccgactgcaccgaggagttcgacgccatccactccgacaaggccaaggcgctcctcgacacctaccgcatcggcgagctcatcaccacgggcaccggctacagctccgacaactccgtccacggcggctccgtcctgtcgcacctcgcgcccatccgcgaggccgtcagggctcccgcgctctccaacccgcgcgaaaagatccactgccgcctcgtcggcaagaaggagctgtcccgcgacgtccgcctcttccgcttctcgctgccgtcgcccgaccaggtgctcggcctccccatcggcaagcacatcttcgtctgcgccagtattgaagggaagctgtgtatgcgggcgtacacgcccacgagcatggtggacgagatcggccacttcgacctcctcgtcaaggtctacttcaagaacgagcaccccaagttccccaacggcggcctcatgacccagtacctcgactcgcttcccgtcggctcctacatcgacgtcaagggcccgcttggccacgtggagtacaccggccgcggcagcttcgtcatcaacggcaagcagcgccatgcgagccgcctcgccatgatctgcggcggaagtgggatcacgcccatgtaccagatcatccaggcggtgctgcgcgagcagccggaggaccacacggagatgcacctcgtgtacgccaaccggacggaggacgacatcctcctccgcgacgagctcgaccggtgggcggccgagtacccggacaggctcaaggtgtggtacgtcatcgaccaggtaaagcgcccggaggaggggtggaagtacagcgttgggttcgtcacggaggccgtcctgcgggagcacgttccggaaggtggggacgacacgctggcccttgcctgcggaccaccgccgatgatccagttcgccatctcgcccaacttggagaagatgaagtacgacatggccaattctttcgtcgtgttc

SEQ ID NO: 5677 - DNA, 1287 bp, Zea mays
atgaggaagccagaagaaatcacaaaagaagaatatgctgccttctataagagcttgacaaatgactgggaggagcatctggctgtgaagcacttctctgtggagggtcaactggagttcaaggctgttctctttgttcctaagagggccccctttgatctctttgacaccaagaagaagcaaaacaacatcaagctctatgtgcgcagggtgttcatcatggacaactgcgaagagctgatccctgagtggctgagcttcgttaagggtattgttgactctgaggaccttcccctcaatatctctcgtgagactcttcagcagaacaagatcctgaaggtgatcaggaagaaccttgtgaagaagtgtgttgagctcttctttgagattgctgagaacaaggaggactacaacaagttttacgaggctttctccaagaacctcaagcttggcatccacgaggactcgcagaacaggaccaagatcgccgagcttctgagataccactccaccaagagtggtgatgagctgaccagcctcaaggactacgtgaccaggatgaaggagggacagaatgacatatactatatcactggtgagagcaagaaggcagtggagaactcccccttccttgagaagctgaagaagaggggctatgaggttctgtacatggttgatgccattgacgagtatgctgttggtcagctcaaggagtttgagggcaagaagcttgtctctgccaccaaggagggtctgaagcttgatgagactgaggacgagaagaagaggaaggaggagctgaaggagaagtttgaggggctgtgcaaggtcatcaaggaggttctgggtgacaaagttgagaaggtggtggtgtctgatcgcgttgtggactcaccgtgctgccttgtgactggcgagtatggctggaccgccaacatggagaggatcatgaaggcacaggccctgagggactcgagcatggcgggctacatgtcgagcaaaaagacaatggagatcaacccagagaaccctatcatggatgagctccgcaagcgtgccgaggctgacaagaatgacaagtcagtcaaggatctcgtgatgctgctgttcgagactgctctcctgacctccggcttcagcctggatgaccccaacaccttcggcaaccggatccaccgcatgctcaaactcggtctgagcatcgatgaggacgagcctgttgaggcagaggctgagatgcctcagcttgaggacgacgctggtgaaagcaagatggaggaggtcgac

SEQ ID NO: 5678 - DNA, 474 bp, Zea mays
atgcccgtacggttcaggacctttggcgccgaacgcgggaccgcagcgccgggagttttcgcgtcggtaggcggcagtgtggcgttcgcaagcaacggcgctaggagggccgagggtgccagcggccccaatgacaccgcccgccgcggcccgcccagcaggttgacggcgtcgcgcgctgcgagggcgaggatgtcggcgcaggagacggtggccttgcaggacgcctccacctgggccttgatggcgtcgatgacctcgtacccgcgcagcgagttggcgttgggccccgcgttcttctccccggtgaagttaccgggcacgtcgtccagcaagacggaggcgtcgcagccattgacgaagcagtcgtggaagaagaggcggaggagggacgcccccatgcgcggctccgcccggacggcgcgcgccacgccgcggcgcacgatgggctgcagccccgggcacgtcgcgtcg

SEQ ID NO: 5679 - DNA, 291 bp, Zea mays
atgtccagtaagtcctcaactgttggttgtccagaagctgatgtctttgtagcattcagtatcccaaatgtaagatatccaccaaacttgagcgctaacactcttgacattaaacctttttcactcattacgagtccaatcataggcacttggcagtgtaccatcacttggaacatccgtgatacatcgacaatgtccttggcggttgttgcaactttcactatatcagctccaactgcttgtatactagcgacaagatttgtaatttcctcacatgatggagtatattca

SEQ ID NO: 5680 - DNA, 507 bp, Zea mays
atgttcgtcgcgccgtccaggggcggcgccgcggcgaggggccccggcgccggcgccgcggaggagttcgacgagtcggacgtctggggctcgttcggcgcggactcccagtactccagccccggggccgagctgggcgccggctgggcgcgcccgatccccggctccggcgccaggcggaagaagcccgtggacggcggcggcggcggcggcgcggcggggtcgctgccgatgaacataccggactggcagaagatcctcggggtggagtaccgggaccaccaccgcgcgggcgagtgggagcctggcgcggacgacgacgacgacgacgacggcagcagctacggcagggcgcgcggcggggcggagatggtgccgccgcacgagctggcgtggcgcagccgggcggcgtcgctgtcggtgcacgaggggatcggcaggacgctcaaggggcgcgacctcagccgggtccgggacgccgtctggaagaagaccggattcgaggac

SEQ ID NO: 5681 - DNA, 747 bp, Zea mays
atggcggcggcggcgagacagcgggggacggtgaagtggttcaacgacaccaagggcttcgggttcatctcccccgaggacggcagcgaagatctcttcgtgcaccagtcgtcgatcaagtcggagggcttccgctcgctcgcggagggcgaggaggtggagttttccgtctcggagggtgacgacggccgcactaaggccgtcgacgtgaccggccccgacggatccttcgtcaggggcggcggaggcggaggaggaggcggcggcggctacggctcccgcggcggtggcggatctggcggcggcggtcgcagctacggtggtagctggggcggcggccggagatccggcggcgggggcggtcccggcgcgtgctacaagtgcggcgagcccggccacatggcaagggactgccctagcgccgacggcggaggcggctacggcggaggcggctacggcggcggcggctacggaggaggaggcggcggcggcggtggctgcttcaagtgtggcgagcctggccacatggccagggactgctccagcggcggcggcggctacggcggtggcggcggcggcggtggaggcggctgctacaactgcggccaggccggccacatggccagggactgccccagcggtggcggcggtggcggagggaggttcggcggcggcggcgggggtggcggcgaccgctcctgctacaactgcggcgaggccggccacatcgcccgcgactgccccacg

SEQ ID NO: 5682 - DNA, 480 bp, Zea mays
atgcagcacgtgacgcagctgtcgttcctcctgctggcctactccaactacctgagccacgccggcgggcgcgtctcgtgcggctcgtcgtcggcgtcgccggtgcagctccgccgcgtggccaagcggcaggtggactacatactgggcgacaacccgctgcggatgtcgtacatggtggggtacggcgcgcggttcccgcggcggatccaccaccgcgccagctcgctgccgtccgtggcggcgcacccggcgcggatcggctgcaaggccggcgccgcctactacaccagcccggcgcccaacccgaacctgctcgtgggcgccgtcgtgggcgggcccaccgacgactccgacgccttccccgacgcgcgcgccgtgttccagcagtccgagcccaccacgtacatcaacgcgccgctcatgggcctcctcgcctacttctcggcacatcccaacccagccgagtcgggcggcgac

SEQ ID NO: 5683 - DNA, 1710 bp, Zea mays
atgtttggaattagggatgccgaccaccaagaccagatgaagccgctgcttgcgcagcagcaccagcaccagcaccagcaccagatgccacctgcgccgctgctcaacgccgcttcgtcgtcggcggggcccggccaggcggcaggggcaaccccgccggcagtgaagaagaagagaaacctaccagaccctgacgcggaggtgatcgcgctatcgcccaagacgctgctggcgacgaaccggttcgtgtgcgaggtgtgcaacaaggggttccagcgggagcagaacctgcagctgcaccggcgcgggcacaacctgccgtggaagctgaagcagaaggacccgtcgcaggcgcagcggcggcgcgtgtacctgtgcccggagccgacgtgcgcgcaccacgacccctcccgcgcgctcggcgacctgacggggatcaagaagcacttctgccgcaagcacggcgagaagaagtggaagtgcgacaagtgctccaagcgctacgccgtgcagtcggactggaaggcgcactccaaggtctgcggcacgcgcgagtaccgctgcgactgcggcacactcttctcgcggagggatagcttcatcacccacagggctttctgcgacgccctcgcgcaggagagcgcccggctgccgcccccaggcctcaccgccagccacctctacggcgccaccaacgcggccaacatggggctcagcctctcgcaggtcggttcccacctcgcatccacactcggtgcggacgctcacggccaccatcaggacctcctccggctcggtggcagcaacgccgcgagccgctttgagcatcttctggggccgtccaacgcctccgcgttccggcccctgccgcctccaccatcgtcggcatttctcatgggcgctccgcaggagtttggcgcaggcgacggcagcgggtcccacgggttcttgcagggcaagccgttccacagtctcatgcatctgccggatctccaaggcaacggcgccgggggtgcctcggcgtcgtcggctacgggtctcttcaaccttggctacatcgcaaacagtgcaaacagctcaggtacttccagccatggccatgcaagccagggacacctgacaagtgatcagttcagcgaaggaggtggcggcggcggctccgagtcatcggccgcgatgctttttagcggcggcgggaacttcgccggtggtgaccaccaagttgctcctggcgggatgtacaacaatgatccggccgtgatgctgccgcagatgtccgcgacggcgcttctgcagaaggcgtcccagatgggctccagcgcgagcgcgcacggcggcgtgtccgtgtttggggggctcgtgggctcgtcggcgccctccgctaggcacgcccgggcacccatgctcgaccagagccagatgcacctacagagcttgatgagctcgctggctgccggcggcatgttcggcggcgccaacagcggcagcatgattgacccgaggatgtatgacatgaaccaagatgtgaagtttagccagggccgtggtggcgctgagatgacgcgcgacttccttggcgtcggcggcgatggtgtcatgagaggcatgacagtggcgagagcggggcaccaagacggtgccgatgacatgaactccttggaagccgagatgaagtcggcctcgtcgcccttcactggagacaggatgcaa

SEQ ID NO: 5684 - DNA, 606 bp, Zea mays
atggccgtagtcatcagcgcggaccgtatcgccgccggcgaccacccggggtgcgcggaccggagcagcgcggcggcgccgctggcgtgcgggcacgccatggacgtcccggacaggatgttgaactccgtgcggcgggtatcgccctccaggccggtcggacccgtggcgcccgtccacgcggcgaggatgttgacgcccggtgcgatgaagtccggcttgagaatctccgggacgagcccgttgggtccacgcgccgagaaggaggccaccacgggtgccggcttgacgccgacgaccgtgcccccgaagctgattgtcgccatcgggctggaggcgttcgcggcatacgctttgaccgcgtcgccctccttctcgcccaccgcgcaagcagggaggacgtgggcgtctccaaccagtccctcgccgttggcctccccgttagtaaggaccatcgccgcgccaccagcttccttgacgaccattcccttggccacgcgcgggctgctgccgcggtcgcagacgacgatcttgcctttcaccagtgaagggtcgatggagttctccatgcacagcgaagcggagagcccgccagtcctcccgggg

SEQ ID NO: 5685 - DNA, 717 bp, Zea mays
atggacacccatatcggatccgtgaacggggcggcgtcgaaccagacggttggctgcccggcgtcggcgccggggtgcccgatggcgtccacgccggcgcagcccgcggcgaccctgtcggcgggggaggcgtcgctggggcgccacctcgcgcgtcgcctcgtgcaggtcggcgtcaacgatgtattcgcggttccgggggacttcaacctcacgctgctcgaccacctgatcgccgagcccggcctgcgcctcgtcggctgctgcaacgagctcaacgccgggtacgccgccgacgggtacgcgcgcgcgcgcggcgtcggggcctgcgccgtcacgttcacagtcggggggctcagcgtgctcaacgccatcgcgggcgcctacagcgagaacctgcccgtcatctgcatcgccggcgggcccaactccaacgactacgggaccaaccgcatcctccaccacaccatcggcctccccgacttctcgcaggagctccgctgcttccagaccgtcacctgccatcaggcggtggtgaacaatctggatgacgcgcacgagcagatcgacacggccattgccacgggcactgagggagagcagcccgtgtacctcagcatcagctgcaaacctcctgggctgcctcatcctacctttcgccgcgaaccagtgctctttcttcctcccccccaggacgaagcaacaaaattgggtcta

SEQ ID NO: 5686 - DNA, 450 bp, Zea mays
atggccaccgtcctaggcagcccccgcgcgccggccttcttcttctcgccgtcctccctccgtgccgcgccggcgcccaccgccgtggcgctgcctgcggccaaggtgggcatcatgggccgtagcgccagcagcaggggcaggctgcgcgcgcaggccacctacaacgtgaagctgatcacgccggagggggaggtggagctgcaggtgcccgacgacgtgtacatcctggaccaggccgaggaggacggcatcgacctgccctactcctgccgcgcggggtcctgctcctcctgcgccggcaaggtcgtctccggctccgtggaccagtccgaccagagctacctcgacgacggccagatcgccgccggctgggtgctcacctgccacgcctaccccacctctgacgtcgtcatcgagacgcacaaggaggaggagctcaccggcgca

SEQ ID NO: 5687 - DNA, 294 bp, Zea mays
atgcaggccatgccgctcccaccgtccttctgcgccaccggcgccgtacgcttccctttcagcagctaccccgtgacgcacccgtattacttcttcgggcaggcggcagcagggtgccatatgctgaagctgccaccgacgacggtgactgtggctcagagcgactcagactcctcgtcggtcgaggatctgtcgccgtcgccgtcgccgtcgccgccggccgccgtgtcagcgacgagatccgccacgtttgatctcgacctcaactgcccaccgccggccgaggcggaggca

SEQ ID NO: 5688 - DNA, 1149 bp, Zea mays
atggaaggctacgaccgcgagttctaccagttcagcgaccagctgcgcctgcagacggccgccttctcgggcctctccctcggcgactccatctggtcccccgccggccggcgcaacaacagcaacgacgtcctcttcgccgcctccgcgtcgcccgccgacgccgccgccaagagcaacgccgtcgtcgggctcaagctcaacgacggagggcccggcctcatcggctccgggaagctggccttcggcggcggcgccggaggcggcggcaccaacaaggccgaccgctacaacaacaacaacctccccaacaccgacaacaagaccgtgtacaacaccagcagcagcagcttcatgggcaacggcagcagctacgccaagaacaacaacaacaacgccgacatgctggcgttcgacaagatggggagctacggctacaacggcggcggtaataccaacaacaacagcaacggcgtggaggtgaagagctacttcaacaagtccgccgggagggcggcgagcaacaacaacaacaacaacaacagccacgccggcggcggcaacaagaagggcggcgccggggagtacggcaggaaaaagcacgccaagagcgaggggcgcggcgggcggccacggacaagcagcggttcaagacgctgccggcgtcggaggcgctgcccgcgggggccaggccatcggcgggtacatcttcgtctgcaacaacgacactatggacgagaacctcaggagggagctgttcgggctgccgtccaggtacagggactctgtgcgtgctatccgcccgggactgcccctcttcctctacaactactccacgcaccagctccacggcatcttcgaggccgcgagcttcggcgggaccaacatcgacccgacggcgtgggaggacaagaagtgccccggcgagtcgcgctttcctgcgcaggtgcgggtggcaacgcggaagatctacgacccgctggaggaggacgccttccgccccatcctgcaccactacgacgggcccaagttccggctcgagctctccgtcaccgaggccctcgccctcctcgacatcttcgccgacaaggacgacgcctgatccccatcggatctgtcgtcgggccactcgaagctcggatgcacgaa

SEQ ID NO: 5689 - DNA, 912 bp, Zea mays
atgaccacgagatcgccggacatcagctggcagatgagggcagtcagggtgctacccatgttcttggttcctgctctagctgctctcatctactcgaccattacaagcctcacgaaaatgcttgacaacagagaccaacaaactcttgaaaagctacgaactgaaaggcaagccaagattgatgaattgaaggagagaacaaattactacactactcagcaacttatacagagatatgaccttgacccagctgcaaaggcggcagcggcaacagttttggcatcaaagttgggtgcggattctggactgagagtctttttgggagatgaaacaagaagggatgcagcaataggtagaagtaatgataacaatcttggaccaactactggacttaggcaaagaaaaggacacgtaaccaatggtgctggaagggcccaatcccttgagccatttgatggctccaatgtgtatgatggcagtgatgaaggccccagccctcctaatcagactgttgagcactttagaggtccatcgggtaatgatgggggttggcttgcacgagtagcagctctgcttgtaggagaggatccaacacagtgctacgctctaatctgtggcaactgccatatgcataacggtcttgcgaggaaagaggactttgccttcgtcacatactactgccctcactgtaatgccctcaatggatcccggcaacatgatgaccatgaattggtacctgattctggcaaggagagtcctgattctcaatctggcggaatcattggccaagctggtgcaagccttgcaacctcaggtgctgcgagtcctgttgcaagcagcctaccaacccttgaagaactctctgcagaggaagattctggggagaaggcgagcagtgaccaacctgccaat

SEQ ID NO: 5690 - DNA, 552 bp, Zea mays
atgcacgtggcgtggatgcccgtcgagccttggtcaagcaaagaagccattagtgctagtgttagcggcgggcatgtgcggcatctgggccgcctggatgctctgcaggaacatcctctcctccgccgacgcggcgaacccgtgggaggcggcgggggcgaagacgtcgccgccgtcttgcagcaggccgccgccgccgccgttgctatagccgaatggcgacgccgcgccggcgtactgctgctgctgctgctgcctgcggagctgctcctggagcggcgcggggtgctggctccggtgcagctggtggtcgaaggacatgacggcggccgaggacggcgggaagccgtagtcggcggcgaagttgatgaccggggccccgaacgcccccgcggggggcgcggggatgcccgtgaactgctgcaccatggcacggaagttggccgtgtccgtgttcagcagcgtcacgggcgcgcgccgcgacgcgcgggaccgccgccgtcgtcgtcggggggcagcaggaccggcccggcgtcgtggtggtggtggtgg

SEQ ID NO: 5691 - DNA, 486 bp, Zea mays
atgacggcgacgacgacggcggcgacgaggagaagggatacgacgagaaccagaagttcgacgagttcgagggcaacgacgccggtctcttctccaacgccgattacgacgacgacgaccgcgaggcggatgctgtgtgggagagcatcgaccagaggatggactcgcgccgcaaggatcgccgcgaggcgcgcctcaagcaggagattgagaagtaccgcgcgtcaaaccctaaaatcaccgagcagtttgctgatctcaagaggaagctggctgatctgtccgcgcaggaatgggagagcataccggaaattggggactactcgctgcgcaacaagaagaagcggtttgagagcttcgtgcccgtgccggacaccctgcttgagaaggctcggcaggagcaggagcatgtcacagctcttgaccctaagagccgtgcggctggtggcacagagacgccatgggcacagactcctgttactgatc

SEQ ID NO: 5692 - DNA, 534 bp, Zea mays
atgctgtgtccatgcatgcatcatgttctcgtatataatgtcagtggcacgttcgttcgatcgtccgcgtgtatatctcagtatctcgtgaaggagaaatccagtgaccccgcgcggcctgccggttcttgcgttgcagcgttccagtacagctcggcgcactcggtgctggaggtgagcgaggcggaccacggcgcgtgctcggcgagcaacccgctgcggtcgcaccagggccagagcaccaccatcccgctcaccaaggccggcacccgctacttcatctgcggcgcccccggccactgcgcctcgggcatgaaggtcgccatcaccgtctccggcggcggcggcggcggcagcagcagcgccgacaacaccgcgactccgtcgggtccctccgtgcgggcgacgaacacgaagccggcgtccggtggcgcgacgacgacggacgagtcggactccagcgcggctggcagcggcgcccgcctcgcgatgggcctgctgttcggggccgcgggcctcgctgcaataatgggc

SEQ ID NO: 5693 - DNA, 519 bp, Zea mays
atggcctcccgcctcgccgtcgccgtcgccgtcgccgcgcccgcgtcgtctccttccccggtcggcaccgtcgccccgccccgcgtcgccctccgccgaggcctcccgccgacgtggaacgctctccgcgccctccctcgatcccgtggcgcggccgtcgtgtgccaggcccagggcggccaggacaccgccatccaagttcctgatgtgagcaaatccacatggcaatcacttgtggtggagagcgagcttcccgtcctcgttcagttctgggcctcatggtgtggaccgtgtaagatgatagaccccatcgttggcaagctctcgaaggagtacgaaggaaagctgaagtgttacaagctaaacaccgacgagaaccctgacatcgcgacccaattcggcatccggagcatccccaccatgatgatattcaagaatggtgagaagaaggacgcggtgattggagccgtgccagagagcaccctggtcacctgcatcgacaagtacgttggtgggagg

SEQ ID NO: 5694 - DNA, 510 bp, Zea mays
atgggcaagcacctacctgccgccgccaccgccgccgccgccgccgcggttcgctcgtacgcccgcagccttcgcgtcccatccgataccgccgcatccgccgggagggcagataagacgccgtctgccccgctggatacgcccaggaaatccgctgccgccgctgccgcggccagctccgggcgggccgaggtgcgggatttggcggcggcgtgcgggctagaggcggacgagagggttccgctcgcggaggtggtgtcggactgcacgaggcggtggttccaggacgcactcaaggaggcgcgcgccggcgacatcaccatgcaggtgctcgtcggccagatgtaccgcagcggatacggtgtcaacaagaacgagcacaaggcaagagtttggatggagaaagcatcaagatatcggtctacagtatggaaagttagcaataaacgtccagggtacaatgccagtgactcggactcaggcacagatgatgctaaggaaacatgcaaa

SEQ ID NO: 5695 - DNA, 795 bp, Zea mays
atgtcctcgcccgcgccctccccgcccgccggggcgccgtcggagccgctcctgctcccgctcccgcccccggagttctactgctaccagtgcgaggccacggtgtcgctgcccgagccggccgcgccctcctcggccaggctcctctgcccgctctgccatagcgacttcatcgaggagaaccctagcaccccgtctccaccaccacctccgccggcgccgcccccaccgcttttcctctccgactcctcctcctcctcgctctcggacgaccccgacgacgacttcgaccttgtcatggaccccgacgtggtgcgcgcctaccttagccgcttcgcccaccgccaccacctccagcagatcggccacggccccggcccgcacggccgaggggagccgcccgccacggccgcctccatcgacgtgctgtccacggtcgaggttgctgagcccaccgtcgtctgcgccatctgtaaggacgacctgaccctcgactacgaggcgcgtaagctaccctgcacccacctcttatcactacttctgaatggaaacctggctcgggatgcacaactcctgccccgtctgccgcttccgcatcccccccgccgacgaccccgaccaggccgcaccgtcgcagcaggacccgccgcccacgcggatcaccatccgcttcagcaccaccacacgccgccgcgtccgcatcggcagcgatgcgccactggcgtctcatatctcggcgtcgcccacgcagctcgcacaggctattaccggggatggagctggtggacctgccaa

SEQ ID NO: 5696 - DNA, 654 bp, Zea mays
atgctttcacctgaatccctgcttttatctttgctcttgtcttttttcttgtctcggtgtttttcttttcggtctttcttatcttggtgcttatccttactcctgtccttgtccttcttttctttaccttcttttctaactttgtccttcttgtccttcttatgcttcttctccttttgtttctccttgtcaagctgctgctgctgctgcaggtgcgaggctagctggccgtcggggcgcgcggtcttggcatatcctggtggcggaaacgggaagcagcgagacatggcacggccgcctcgggcctcggatcacctacccacccccgccgccgccgccgccgccgccgccgccgcctcttcctcctccttgacgactgcacctctcaggctcaaagcaacaggtcctcctccacccgccgccaccggctcactcgtcctgcgccaggaaccaccacaggcatgccctccggcctctcatgcccgcctccggcgacggaatcgcggggatctgtgcccgaattgccctccgcgcgcgcgcgggggtccgaggatccaatccaatccggccacccgcgcgaccgcgacagaatcgggcgccgcgatctcactcgttttagttttcgtttgctcccagcgcccgctgttgtcggag

SEQ ID NO: 5697 - DNA, 453 bp, Zea mays
atgagaattgaagatgcaggatgcaagcatgcaggtgtgctgctcgcgtcgcgcgcgcgtgcgcatgcggtggcaacggggcctcgatctctctcacgtactctcagtgatgcaaggggttggggcccgaaggcaccagcctcttctgcacgccgtaccgcggatcgatcatcgcctcgtcaccctcgccgccagctgctgacggtggaagagtcccgtgccggttccatcgccggtccgcgtggtggtggtggtggtggtggtgttgatgatgaagatggtggtggtggtggtggtgaagaagatagcggtggttgtaaccagcagctgacgaggacgaggcagcgtcgaagcttgtcatggcgagcagcatcttcctcgggacggcggcgggccacctcgccggcctcgtccccgccaggccgccgccgttcccgtggatcaacgcggctg

SEQ ID NO: 5698 - DNA, 405 bp, Zea mays
atgagggctaccgtggccctgtggagggcgaggtcagccttctgcatcaggcagtgggccttctccctcttgagcctcgccatggcggcggcgtgctgcgctgcgcccgcggcgtcccgcagcttcagctcctcgacgtcgacgcgggaggagcccgggaagaggtgcttcgagttctgccagtcgtggatagcagcgttccagtggtcgtgcgcgctccgtttcgctctctgggggcggcaggaaggtgatggctggtggtcgtcggagaaagcaagggctgcgctccttttggtgctactgttgttcctggaaaatcttggtgtggagcttcgttctgaggactcgaatgcccgaggagaatctgttcttgtagagaacctgggagagtaccctgttggggag

SEQ ID NO: 5699 - DNA, 408 bp, Zea mays
atgctgtctacaacaagtccgccttattttaaaattttacatgtatgcaaaagctataaccctcaaagtttaaaatttatggtatatgcacaactacagaacagatggacgcctgctagaagctcattgttcgtcttcggtttcctcgtcatcgctactagcaactctgttgtagttccatctatcctcgacattgttgcccccctcttcttcctcggtctcctcgctgtcatcctcgtacatcactttccttggccactgctgctcctcgggaaggtgctcctcagggaggttcacagctggcgatggcgctgcgtacccttctttgcgcttggagaccttggctggtggcattctagcagtgatgtccggtctgctcctatgggaactcttcgagatgctgcgctt

SEQ ID NO: 5700 - DNA, 615 bp, Zea mays
atggcagcgaggttcgacaccaagagctactgcaggcagagtttggtcggcggcaactacggcctgctaaacaccacgacgttccagcctaaccctgactattacagtgctctactgtggcatcgcctcatggggaccaaagttctagcagtaacattcagcggcacgaacaagatccgcgcgtacgcgcactgcgcgagagattcaccaggaatcactctgctgctgatcaacctgagcggcaacgccaccgcgcgggtctcggtgacggcccaaggggctgccgcggcgcacgcgcacaggcacaggcacgacgcgaggaagcacggcggcggcaggaagttccggcacgtgcacgtccccggcttcgccggcggcggcgaggcggcggcgggcgccgtgagacacgagtaccacctcacccccaaggacggcgacctgacgagccaggtcgtgatgctgaacggcagggcgttggccaccgacgcggcggggaacatccccgccctggaggcggtcgaggtggacgcggcgcggcccatcgccgtcacgccctactccatcgtgttcgctcgcgttccgcatttcagtgccccggcgtgtagggtagaccgg

SEQ ID NO: 5701 - DNA, 1056 bp, Zea mays
atggcggcgatgaccctggatgagcggttcgaaatgctgcggggcatcggggaggagtgcatccaggaggacgagctcaggcgactgcttgagaacaagcccgtacccatctgctacgacggcttcgagccctctggacgcatgcacatcgctcagggcgttgtgaagaccatcaacgtgaacaagatggtcaacgccgggtgcaaggtgaaaatttggatcgccgactggttcgcgcagctcaacaacaagatgggaggcgacctgaagaagatccagacggtagggcgctacatgatcgagatttggaaagcggctgggatgaaccttgacggggtggagttcctgtggtcctccgaggagatcaacaagcgcgcacacgagtactggccaattgtgatggacattgcccggaaaaacaacgtcaaaaggataatgagatgctgccagattatgggcagaagtgatcaggacgacttgactgctgcccagattttttacccttgcatgcaatgtgctgatatatttttcttaaaggctgacatatgccagttggggatggaccaaaggaaggtcaacgtgctagctagggagtactgcgatgacatcaaacggaagaacaaaccaattattctttcgcatcatatgctccctggttttaaagaaggccaggagaaaatgtcaaagagtgatccatcctcagctatctttatggaagatgatgaggcccaagttaatgtgaagataaagcaagccttttgccctcccaaaattgttgaggggaatccttgtttggagtatattaaatacattgttttcccttggtttggaagatttgaggtcatccgtaaggaaagcaatggtggtaacaagacatttacatgcatgaatgaactaatttctgattacgagactggtgctttgcatcctgccgatgtcaaacctgcactggcaaaagcaataaatgaaattttgcagcctgttcgtgatcatttcaacaacaacaacgaagccaaagttcttcttaacactgtcaagaagtacagagtaaccaat

SEQ ID NO: 5702 - DNA, 513 bp, Zea mays
atgggacctgccaggcagggccaagatgggggagaaggagtggtacttcttctgccacaaggatcgcaagtacccgacgggcacgcggaccaaccgcgccacggagaccggctactggaaggccaccggcaaggacaaggagatcttcaggggccgcggcgtcctcgtgggcatgaagaagacgctcgtcttctaccgcggccgcagtggttgaaggcgctcgtggccgactgcgccacgcgcagctgcacgcgcctgctgcttcagtcgggcgaggtggccgcgcggggggggctccagcacgacctcgccatgctgcacgacgtgctccccgccgcggagctcgggctcgccgacgacagcgcccgcgtcgcggcagtgccgccgcgcggcggccccggagctggagctaaaggcaggcgtgctcgcgctgatccaggaggtggagcgggagggagcagagggcaggggaggcgcggttggaagggcaccggcgggcggcggctggtaggg

SEQ ID NO: 5703 - DNA, 486 bp, Zea mays
atgttttgggaaacaagggttccggcttttggagtgccatggccacctcatggtggtactgttgtcctgattgtcgtatcctacgtgttcagatatgctagagttggtcctatagtaatggcaatccatgatgcaagtgacgttttcctggaagtagggaagatgtccaagtacacccattgtgattgcttgccaatgtttcgtttctgttttttgtatttcatggttcttctccgtctcacatattttccgttctggattctgagaagtacaagctatgaggtcttgttgactttggacaaaaagaagcacaactttgatggtcctatatactattatgtgttcaattcccttctattttcactacttgttctccacatatattggtgggttttaatatatcggatgcttgtgagacaaatcaagacaagaaatgttggagatgatgttcgatctgattctgaaggagaagacgaccatgaagat

SEQ ID NO: 5704 - DNA, 1125 bp, Zea mays
atgcgggcagcagaactacacctccatgttcagcttcggcgactcgctcaccgacaccggcaacctgctcgtgtccagcccgctctccaaccacatcgtcggccgctacccctacggcatcacctacttccaccgctccaccggccgctgctccgacggccgcctcgtcgtcgacttcctagcgcaagcgttcggcctgccgctgctgcagccgtacctgcagtcccgcggcaaggacctgcgccggggcgtcaacttcgccgtcggcggcgccaccgccatggatccgcccttcttccaggagatcggcgcgtccgacaagctctggaccaacctgtccctcagcgtccagctcggctggttcgagcagctcaagccgtcgctctgcagctcaccgaaagagtgcaaggagtacttcagcaagtccctcttcctggtcggagagatcggggggaacgactacaactacgccttcttcaagggcaagaccctggacgacgccaagacctacgtccccacggtcgccgccgcggtcaccgatgccaccgagaggctgatcaaggccggcgccacgcacctggtggtgccggggaacctgcccatgggctgctcgtcggcgtacctgaccctgcacccgggccgcaacggcagcgactacgacgccgccggttgcctcaggacgtacaacgacttcgcgcagcaccacaacgctgtgctccagcggaaactgcgggcgctccgggcgaagtacccgcaggcgaggatcatgtacgccgactactacggcgccgccatgtccttcgccaagaaccccaagcagttcgggttcacgcaggggccgctgcggacgtgctgcggcggcggcgggccgtacaacttcaacccgaaggcgagctgcggcgtgcgggggtccagcgtgtgcgcggacccgtcggcgtacgccaactgggacggcgtgcacctgacggaggccgcctaccacgccatcgccgacagcatcctcaacgggccctacaccagccccaggctcctctgatccgaacgccggtggttgaagctcgtcgtccgtccatcggcagccgcagctcatacaactgtagtggcgccaacaatgtggctggcctg

SEQ ID NO: 5705 - DNA, 921 bp, Zea mays
atggagcggctgcagcggatctttggcgcctccggcatggggcagccgccgacggactcgccgctgctcgactcctccgagcaggtctacatctcctccctcgcgcttctcaagatgctcaagcacgggagggccggcgtgcccatggaggtcatgggtctcatgctcggcgagttcgtcgatgactacaccgtcagggtcgtcgacgtcttcgccatgccgcagagcgggactggggtcagcgtcgaggccgtcgaccacgtcttccagacaaacatgcttgacatgctcaagcagaccggcaggccagaaatggttgtaggctggtatcactcacatcctggcttcggttgctggctatcaggcgttgatatcaatactcagcagagttttgaagctttgaaccccagggcagttgctgttgtgatagaccccatccagagtgtgaaggggaaggtggttattgatgcattccgcctaattaatcctcagaccatgatgcttggccaggagccacggcagacgacatcaaatgttgggcacctaaataagccatcgattcaggctcttatccatgggctgaacagacactactactcgattgcaatcaattaccgaaaaaatgaacttgaggagaaaatgttgctgaacttgcacaaaaagaaatggacagatgggctaattttgaagaggtttgacactcattcaaaaaccaacgagcagactgtccaggaaatgctaaacctagccatcaagtacaacaaggcggtgcaggaggaggacgaactgccacctgagaaacttgcgatagcaaatgtaggtcggcaagatgcaaaaaagcatttggaagagcatgtgtccaatttgatgtcatcaaacatagttcagaccctaggaaccatgctcgacacggttgtattt

SEQ ID NO: 5706 - DNA, 936 bp, Zea mays
atgtggcgagggagatcatcaaccaccgctcgctgcgccaacatcatccggttcaaggaggtggtgctgacgccgacgcacctggcgatcgtgatggagtacgccgccggcggcgagctgttcgaccggatctgcaacgccgggaggttcagcgaggacgaggcgaggtacttcttccagcagctgatttgtggcgtcagctactgccactccatgcaaatctgccaccgagacttgaagctggagaacacgctgctggacggcagcccggcgcctcgcctcaagatctgcgacttcggttactccaagtcgtcgctgctgcactcgaagcccaagtcgacggtcggcacgccggcgtacatcgccccccgaggtgctctcccgccgggaatacgacggcaagacagccgatgtgtggtcctgtggagtcactctttatgtgatgctggtcggtgggttaccccttttgaggacccagacgacccaaagaatttcagaaagacgatcgggaggatcatgtcaatccaatacaagataccagagtatgtgcacgtgtcgcaagactgcaaggagctgctttcaaggatctttgttgcaaactctgcaaagagaataacgatcagggagatcaggaaccacccctggttcctgaagaacctgcccagagagctcacggaggctgcgcaggccatgtactacaagaaagacaacagcgccccgacctactccgtccagtccgtggaggagatcatgaagatcgtggagaaggcgcggacgccgcctccttcctccacccccgtggctggcttcggttgggcggaggaggacgagcaggaggacagcaaggatccagacgaggaacacgaggacggcgaggacgagtacgagaagcaggtgaagcaagtccacgccagcggggagtttcatctcagctgc

SEQ ID NO: 5707 - DNA, 225 bp, Zea mays
atggcttcacgcatgacaccttccaagaggccttttcagagaagatcttcagactacgatggccggggcaagtggcagaagacgaagcacccttctccacataaatctcagttcaaaatcgagcctggtgttcccattttccgtattctctgcccggcttcaaaatctggtaatgtgattggcaaaggaggtgccattattgcaaagatacgtcaagaaccagga

SEQ ID NO: 5708 - DNA, 627 bp, Zea mays
atgaacggtgcgccggtgaggtactcagtgaaggcgagcgcgacgaggccgagcatggcgaagcggccgttccagagctcggcgttggcgctcatgacggcgccgctcctggcctcggcgctgtcgcccctgagcagcggcaccagcgaggccacggacagcacggcagccgtggccgcgaaccaggcgagcccggacccgctgccggcctgcgagaggaggcccccgccgcgggacgcctcgacggcgagcgccgacacgaagcccaccatggcgagccggccgttgatgcgctcgggagccgggccgctgaacgccagcgcgtcccacagcccggggctcgccgccgccgccgccttggactttggcgccggggtggtggccgccgccgccgcctcctttggctcggcctcggcgtcgtcgctctgggccctcacggtcacggccaaggcgcgccggcgcggcgcgagcgcagatgcctggagcagcagccgtacagggaaagcgcgacgcgcgccgggggtggcggaggcgagggggctcatggaggccatcaccgtcgctgccattggagtgtatgcgttcgagtcgttggctcgtagcggcaggcaagaggctcgctcgctg

SEQ ID NO: 5709 - DNA, 129 bp, Zea mays
atggaagacggcgacggcgggccggcggcggtgctggggagcttccagatgcagaacgtggaggtggtgtacgacctggcggcgggacgcgtcgggttccggccgagggactgcgcgctccacgccgcc

SEQ ID NO: 5710 - DNA, 573 bp, Zea mays
atgaagctttatccgtgcccccgtgacatgatggcattcagtgcctgcaacaggcccttaccaaacctcagggcggagctcaccagtagccgggggcatccatttcccagagttgtacacgctctcgccgaccttccaccctggaacgtctttcatgatcctcgcctcctcctcaagacacttcttccactctttgacaaatctttcatcctcttctgcttggagcatcggcagtatagcactgcgagcagcaattttctcttctttgagcgctcggcggaccttgttcccctggccgacctggtacatgccatatgcgaaagcaccgaaggtggtgaggaagatggcggtggcgctgggccccgaggtggggatccggcgggcgaagcgcacgggcgcgaaaccgcccggcggcggcccgtcctgcaccaccggcatctccttgatgctggccatccccggcttgttccgcaccagggactccgtcatcttcggtcccggatccggacgccggtacgcacgcttggcggaactagagctccccgcggggatcaaacgagccgaggctgtcgc

SEQ ID NO: 5711 - DNA, 411 bp, Zea mays
atggctgggaagggaggaaaaggattgctcgccgcgaagacgacggcggccaagtcggcggagaaggacaaggggaagaaggcccccatctcacggtcctcccgcgcgggcctccagtttcctgttggacgaatccaccgtcagctgaagcaaaggactcaggcaaatggccgcgttggtgccactgcagccgtctactccgccgccatcctggagtacttaactgccgaggttctggagctggctgggaacgctagcaaggatctgaaggtgaagcgtatcacccctcgccacctacagttggccattcgcggagacgaggagctggataccctcatcaagggcaccatcgcaggtggaggcgtcatcccgcacatccacaagtccctgatcaacaagtcctccaaggag

SEQ ID NO: 5712 - DNA, 138 bp, Zea mays
atgaacaacccgctgaatatcttgcgcatcaattcctccaagtatgtaatgtttgcatgtgtaaaggctagtctattgttgagagattcaataagcgatccatcactttgcttcttcttctccgcattcagctgcctt

SEQ ID NO: 5713 - DNA, 594 bp, Zea mays
atggcgtccgtggcggagctcaaggagaagcacgccgcagctacggcgtcggtgaactccctgcgcgagcgcctccgccagcgccgggagacgctcctcgacaccgacgtggcgaggtactccaagtcgcaggggagggtgccggtgagcttcaaccctacggatctggtctgctgccgcacgctgcagggccatagcggaaaggtatattctctggattggacccctgaaaagaattggatagtcagtgcctctcaagatggaaggttaattgtgtggaatgcattgacaagccagaaaacacatgccataaagctgcattgcccatgggttatggcgtgtgcttttgcacccaatggccaatctgtcgcctgtggtggtcttgatagtgcgtgctctattttcaatctcaattctcaagcagacagagatgggaacatgccagtatcaagaattcttactggacacaagggctatgtctcatcatgtcaatatgtcccagatcaggaaacacgtcttattactagttcaggtgatcaaacatgtgttctttgggatgttactactggacagaggatatcaatatttggtggg

SEQ ID NO: 5714 - DNA, 282 bp, Zea mays
  misc_feature (8)..(8): n = any nucleotide
  misc_feature (25)..(26): n = any nucleotide
  misc_feature (231)..(231): n = any nucleotide
atgcctgntgattccaacccccttnntattttatcccaaaaaagtgggctcagcgcgagattcttctccagcacaagctacatttctttgaatccggtgcaggttttgaataagttcttcacaagggccagaaacaggattattttgttcagaaaggtaccacatttcagaatacttgtgtgtggtggtgatggtactgttggttgggttcttgacgcgatagataagcanaattatgaatcacctccaacccattgcaattcttccagctggcactggcaa

SEQ ID NO: 5715 - DNA, 903 bp, Zea mays
atggcgcgccaccaccagcagcgggcgctgctcctgttcccactcgtcttcctcctcctcctccttgccccgcccctcgccggcgcgtggggaaaggagggccacatcatggtctgcaagatcgccgagaagtacctgtcggagaaggcggcggcggcggtgcaggcgctgctgccggagtcggcgggcggggagctgtcgacggtgtgcccgtgggcggaccaggtgcgctggcactaccactgggccagcccgctccactacgccaacaccccccaagtctgcaacttcaagtattctcgggactgccacaattctcgtggccagcaagggatgtgcgtcgtcggggctatcaacaactacacggaccagctctacagctacggccagaagacttcgtataacctgacggagagcctgatgttcctggcacacttcgtcggcgacgtccaccagccgctgcacgtaggcttccaagatgacgagggcggtaacaccatcaccgtccactggtaccggaggaaagcaaacctccatcacgtgtgggatgtcagcattattgatacggcgatcaaggacttctacaacaagagcatggataccatggtagaggctctcaagatgaatcttacagatggatggtctgacgacatcgtcccctgggaaaattgcaaaaacaaacccccgacctgcgcgaacgactatgcgattgagagcatcccttattcctgcaactacgcctacaaaaatgtggagcaagacctccctttaggggatgattattttttcagtagggaccccattgtggaaaaaaggttagcccaggctggaatcaaattggggttggggcttaatcggatatttggtggaggtgaaacggattatattcccctccaaggacag

SEQ ID NO: 5716 - DNA, 489 bp, Zea mays
atgtttcgcgtggatcagccccggataatgatatatgaacccatccaactggcttgcaagctccacagttttaatctccttgaggttgtggaagccatccccggcccggatggagatcttgctgggcgtgtagctctcgtcgagcttgaaatccacgtagagagcaacaagctgcagctgcaccttcttctggaaccggatgttcaccaggtgcggctccgccccatcagactgccagtaggcgtcgaggttgtcgtcgcgcagggctgcgacgccgttgccgtccttgaaggaactgacgctccacgcggccctcttcgccacctcccgcatgtccgcgtccacagtcagctccgggctccccttcagccgtccagcgcctgggtccaccgccgccgccgccgccgcctcctcggcgtcggattccatcgggaccagtgcgaggggaagaaccggagaagcagtgaagcacactcaccagggcggact

SEQ ID NO: 5717 - DNA, 399 bp, Zea mays
atgacgcagtcgggcgtggcggagcagatcctggacctaggcgtgctgggctaccgcgccccggagctggccgcgtccaagaagccggcgccctcgttcaaggccgacgtgtacgccttcggcgtcgcgctgctggagctcctgacgggccggtgcgccggggacgtcgtctcggggcccgagggcgccgcaggcgtcgacctcaccgactgggtccggctgcgcgtggcggaagggcgggggtccgactgcttcgacgccgccatggcctcggactctgagagcaacccgcaggctgtgaagggcatgaaggaggccctgggcattgcgctgcggtgcatcaggccggtctccgagaggccggggatcaaatctgtgtacgaggatctttcgtcgatc

SEQ ID NO: 5718 - DNA, 510 bp, Zea mays
atggcgcccaccgtgatgatggcctcgtcggcaaccgccgtcgccccgttccagggtctcaagtccgccgccagcctccccgtcgcccgccgcagcaccaggagcctcggcaacgtcagcaacggcggaaggatccggtgcatgcaggtgtggccggcctacggcaacaagaagttcgagacgctgtcgtacctgccgccgctgtcgacggacgacctgctgaagcaggtggactacctgctgcgcaacggctggataccctgcctcgagttcagcaagctcgggttcgtgtaccgcgagaactccacctccccgtgctactacgacggccgctactggatcatgtggaagctgcccatgttcggctgcaccgacgccacgcaggtgtacaaggagctgcaggaggccatcgccgcgtacccggacgccttccaccgcgtcatcggcttcgacaacgtcaggcagacgcagtgcgtcagcttcatcgcctacaagccccccggcagcgag

SEQ ID NO: 5719 - DNA, 906 bp, Zea mays
atggggggttttgtcaagacccacaagaccaatgcgtacttcaagcgtttccaggtgaagttcaagagaaggcgcgctggcaagacagactacagggccaggataaggctgattaaccaagacaaaaacaagtacaatacacccaaatacagatttgttgtgcgatttaccaacaaggacatcacagcacaaatcatctctgctagtatagcaggtgatatggttcttgcttctgcttactcgcatgagttgccacgatatggtcttgaagttggtctgaccaactatgcagctgcctactgcactggccttctgttggctcgccgtgtgctcaagacccgtggtttagataaggaatatgaggacaatgttgaggccactggtgaggacttctctgttgagccagctgatgagaggaggcctttccgtgctctcttggatgttggccttattaggactacaactgggaaccgtgtctttggtgccctcaagggagctttggatggtggactggatattcctcacagcgagaagaggtttgctggtttcaagaaggatgacaagcagctggatgctgatatccatcgcaagtacatctatggtggccatgttgctgactacatgaggaacctcgctgaagaggagccagagaagtaccagtctcacttcagtgagtacattaagaagggaattgaggctgatgacatggaagctctgtacaagaaggtccatgctgccatccgtgctgatccttctgtggtcaagtcaaccaagcagccaccaaaggagcacaagaggtacaaccccaagaaactgacatacgagcagaggaaggccagtctcattgaaaggctcaaccaactcaactcctcgggcggcgcagatgacgacgatgaggatgacgag

SEQ ID NO: 5720 - DNA, 660 bp, Zea mays
atggcctgcatgatgttgatccgtcgcagattcttgctgtcatttggacgtagttgggatgcggtgacgtacaagcaaccatggccaccacccgtgcatgttgtgatactaggagatggcttgtccgtcaggcttacaccttggcaaccatttgatactgatatctacagctttcctgtgaacagaccagaatcatctgcaagtgtctttggtattgcaacagaatcaacgcagtgtgcctatgattcccaaggaaacagtgtctcgacaatcctcttgatgatgcaaagatgcctttatgaacagatgatgcaatacaaatctgaagagggctgtactcgggtagtgaaatgcctcccaccggctgacgcaagtttacttgtctgggctgttaatcagatgacagatccattgattgcattgatgtatgcggtccaagtgatgatttttctcaaggacaaagatgagtcacctcgagaggatgttttgctgctccagaaggacccatttgatggcaacaggcatcagaaacccaacgtgacacttgccatctccttgaggaaagatctaggagtcattgctgcgtgcactgccccaaccaacgaagtaccaacatatgtggaggactacactagtagctcaaaatctgcaactgctggc

SEQ ID NO: 5721 - DNA, 378 bp, Zea mays
atggctgctaggcgctgggcttccttccttccttacttcgtacgaggctggtgtgtgtgtggtggtggtggtggtggtccggacgtccagttccctccctggctccctccctcctcaggctcgatctccttcttgcctcgcactccaactcgggtgatgaacgaacaagagaagagaatagaggagcgaggtgcgagaaaaaggaggccaaaagcagccgctgctgccttgttggggtatgcaagtacttttctcttttgttatccccttggcaaagactcttccaacctaggagagctcggagcagaggaggcgaaaagcgcccgcccgcccgcgggtagcggagccggtggaggattgcgttgtgttgtgtgtgcc

SEQ ID NO: 5722 - DNA, 348 bp, Zea mays
atgatatacacggcgatcgacacgttctacctgacagatgagcagctccgtgactcgccatcacggaaggatgggatcgacgaggccaccgagactgcgctccgcgtctatggctgtgacctcatccaggagagcggcatcctcctcaggctaccacaagcagtgatggccacggcacaagtattgttccatcgcttttactgcaagaaatcatttgttcgatttagtgcaaagagagttgctgctagctgtgtttggctggcagggaagttggaggagagtcccaggaaatcaaggcatattatatttgtcttccacagaatggaatgtaggagagaaacttgccat

SEQ ID NO: 5723 - DNA, 666 bp, Zea mays
atggcgctgccgaatcaggggaccgttgattaccccagcttcaagctcgtcatcgtcggcgatggtggaactggtaaaactacatttgtgaagaggcatctcactggagagtttgagaagaaatatgaaccaaccattggtgtggaagttcatccgttggatttcaccactaactgtggtaagatcaggttctactgctgggataccgcagggcaagagaagtttggtggcctcagggatggatactatatccatggccagtgtgcgatcatcatgtttgatgtaacctcaaggcttacttacaagaatgttcctacgtggcatagggacctgtgcagggtctgtgaaaacatccccattggtccctgcgggaataaggctggtgtgaagaacaggcatgtcaaagccaaaccggttacttttccacagggaagaagaatctcaggttctatgaaatttttgccaaagagcaattacaactttgagaaacctttcctgtacctcgcaaggaagctggttggtgatccgaaccttcactttgttgaagctgttgctcttaagcctccggaagttaccatcgacatggctatgcagcagcagcatgaagctgagcttgctgcagcagctgcacaacctcttcctgatgacgatgatgatctgattgag

SEQ ID NO: 5724 - DNA, 546 bp, Zea mays
atggaaagggcacaggccgaggtacgtgagaagctccaagggaagccaacggtgaccgaagatgacttggtcgacatgaggtacatgaagctcatcatcaaagagaccctaaggatgcatccggtggtgccattgcttctcccaagggagtgccgagagccatgcagggtgatggggtacgacgtgcccaagggaactaccgtgttcgtgaatgtctgggcgatcagcagggatcccaagcactgggaggacgctgcgacgtttagaccggaacgattcgaggccgcgggtacggttgattttaagggcacggactttgaatacacgccgtttggggcgggccggaggatgtgccccggcatggcgtttgcgcaggcaagcatggagctcgtgcttgcagcgctcctgtaccatttcgactggaagctgcctggtgggatgctgccgagtgaattggacatggcggaggagatgggcatcactgcccgaaggaagcgcgacctttacctgcatccagtcgttgtcagtgtgccaccacatgtctca

SEQ ID NO: 5725 - DNA, 945 bp, Zea mays
atggcgcaggagatcgagcacacccacctccccatccgcggcctcaacctccacgtcgcacaagtaggcacaggtgaactgggcacggtggtgttcctgcacggcttcccggagatatggtactcgtggcgccaccagatgcgggccgtggccgcggcggggtaccgcgccatcgcgccggactgccgcgggtacggcctgtcggagcagccgccggagcacgaggaggtctctcctgacgacctcatcgccgacgtgctgggcatcctcgacgccctcagcgtcccgaaggcgttcttggtgggcaaggacttcggcgccatgccggcgtacgagttcgcgctgcagcacccgggccgcaccctcggcgtggtgtgcctgggcatccccttcaacccggctcccatgtccttcgacgccatcatgcccgaaggattctacatcctgcgctggcgcgagccgggcagggcggaggccgacttcggccggttcgacgtgaggcgcgtggtgcgcaccatctacgtgctcttcgccggcgccgagatcccgattgccaaggaagggcaggagatcatggacctggccgacctgtccacgcccctcccggagtggttcaccgaggaggacctggacgcctacgccaagctctacgagaagtccggcttcgggtacccgctcaagatgccgtacagatctatgcacaagctcccgaaccggctggacgccaagttccaggtgccggtgttcatggtgatgggggagaaggactacgcgttcaagttcccggggttcgagaccgccatgcgcggcggcgtcatggacaacttcatgccggacctcaagatcacctacatccctgaggggagccacttcgtgcaggagcagctcccagagcaggtcaacgacctgctactcggcttcctcagggaccatccctccgccgca

SEQ ID NO: 5726 - DNA, 351 bp, Zea mays
atgggcaggatggagggcgtgtggggcaaggactgcacggagttccgccccgagagatggctcaacgaggacggaaccaagctccggtacgagccgtcctacaagttcatctccttcaacgccgggccgcggacgtgcctcggcaaggagatggcgttcgtgcagatgaaggccgtggcagcggccgtgctgtggaacttcgccgtcgaggtggtaccgggacacgtggtggagccgaagctgtccatcatacttcacatgaagaatgggcttgccgtcaaggtgaggagaagggacgggacgtacggcgccgcgccgccgtcgagcgtcacgccttgcttttctgagttc

SEQ ID NO: 5727 - DNA, 492 bp, Zea mays
atgcccccgccggcagctaccggccggtgtgcgacacggtggtgttcgtctgcctcgcgtccgcctccgccctcatcgtgttcatggtggccgtctgcttccgcaacgccttcgccgccaacgggtacgcgaccgctgccgtggccacaaacggtgccgccggagccaccgctgccaacggcagaagccggtgcgggctggcgccgtccgcgctgtcggcgatccccgtgctcgcttaccgccggaggggcgccgggtgggcgcagtgcgcgatctgcctcgccttggtgcgggacggggagacggtgcgattgctgccggcgtgcggccacctattccacgtcgagtgcatcgacctgtggctgcgctctcacgcaacatgcccgctttgccggcgtggcgtcgtcgaggctcccgtcgaaaaggtttgaaagctcgccgctcttggccccaaaaaaaaaaaaagccaagatcacacgctggctgctatac

SEQ ID NO: 5728 - DNA, 381 bp, Zea mays
atgaagacactaaaggaaacaggtgccattgggaagcaaataaaagatggaattcgtttaatgggccgtggagcagaagaaatcaaatggcctattcaccttgaggtgtcaagggcaactgcaagggccaaagctgccgtggaagctgctggtgggacagtaaggctggtgtactacaacaaacttggattccgggcactcctgaaacctgagtggtttgagaagaagggccgcctgttaccaaaagcagcaaggcctccacccaagcagcgagataaggtcgatagcattggccgcctgcccgcgccgacaaagccactccccttcacggtagaggagctggagtttgcagcccagcgtgaggctgcccgcgtgactgca

SEQ ID NO: 5729 - DNA, 240 bp, Zea mays
atgccgccgaccttaacggttattgccgagcatgactggatgagggatcgagcaattgcttactctgaggaactccgcaaggttaatgttgactcgccggttcttgactacaaggatacagttcacgagtttgcaaccctggacgtattcctaaaaacaccacaggcgcaggcctgtgccgaggacattgccatatggatgaagaaatatatatccctcagagggcatgagttctcatat

SEQ ID NO: 5730 - DNA, 717 bp, Zea mays
atggcggccggcaccgtgacggcccgatccaacggcgagggccacggccacggcggcgcggggtcctggtacccgcagcgccgcccgcactacgggtacggcggggggtccgcctccttccgcggctgctgctgctgcctcttcctgctgctcaccttcctggcgctcctcgccctggccatcgcgctcgtcgtcgtgctcgtggtgaagccccgcaagccgcagttcgacctcgaccaggtgtccgtgcagtacctcctcgtggcctcgccgacgtccccggccggcctgccccccgcgaccccgggcgccgcctacatctccctcaacatcacgctgctcttcaccgcccagaaccccaacaaggtgggcatccggtacggcgccaccaagttcgacgtcatgtaccacggggtgccgctcggggtggcggcggtgcccgggttcgagcagcccgcgcacagcacccgcctgctccagacccgcgtcattgtcgaccgcttcaacgtgctccaggccgacgcgcaggacctcatccgcgacgccgcgatcaacgaccgcgtcgagctccgcatcaccggcgacgtcggcgcgaagatcctcgtgctcggcttctcctccccaaaagtgcaggtgtcggtggattgcgcaatcgccatcagcccgaggagccagtcgctgaaatacaagcagtgtggcgtggacgggataagcgtg

SEQ ID NO: 5731 - DNA, 780 bp, Zea mays
atggcgtcggagaagagcaagatcctggtggtcggcggcacggggtacctgggcaggcacgtcgtggcggcgagcgcgcggctgggccaccccacctcggcgctcgtcagggacacggcgccgtccgacccggccaaagcggcgctgctcaagaccttccaggacgccggtgtgacgctcctcaagggcgacctgtacgaccaggctagcctggtgagcgcggtgaagggcgcggacgtggtcatctccgtgctcggatcgatgcagatcgccgaccagagccggctcgtcgacgccatcaaggaggccggcaacgtcaagaggttcttcccgtcggagttcggcctggacgtggaccgcacgggcatcgtggagccggccaagtccatcctaggcgccaaggtgggcatccgccgcgccaccgaggccgcgggcataccctacacctacgccgtggccggcttcttcgcggggcttcgcgctccccaacatcgggcagctcctcgcccccggcccgcccgcggacaaggcggtcgtcctcggcgacggcgacaccaaggcggtggttcgtggaggagggcgacatcgccacgtacacggtgctggcggccgacgacccgcgcgcggagaacaaggtgctgtacatcaagccgccggccaacacgctgtcgcacaacgagctgctgtcgctgtgggagaagaagaccggcaagacgttccggcgggagtacgtgccggaggaagccgtgctcaagcagatccaagagtcgccgttccctc

SEQ ID NO: 5732 - DNA, 447 bp, Zea mays
atgatcatctgccaggtcgcggtcgcgtggatcatggggtcccagatcggggccgacggcgggtccgcgatggccaggccctactccctcgcggtgctggcgctgacgtgcgtcttctcggcggcgttcggctggtcgtggggcccgctgacctgggtgatccctggcgagatattccccgtggagatccggtcggcggggcagggcgtcagcgtggccgtcaacctgggcgccacgttcctgctcacgcagacgttcctctccatgctgtgcacgctcaagtacgccaccttcatctactacgcggcctgggtagccgtcatgaccgccttcgtcgtggcgttcctgccggagaccaagggggtaccgctcgaggccatgggcgccatctgggagcgccactggtactggagacggttcgtgcagccttctgttgcggaggacccc

SEQ ID NO: 5733 - DNA, 573 bp, Zea mays
atgggcgtccttcctcggcatcgtgctagccaccgtgatgcttctgaaagccctcaccggccgccgcagccgccgcatgtacaacctcccgcctggccccaagccgtggccgatcatcggcaacctcgacctcgtgggcgcgctcccgcaccgctccatccacgagttgtccaggaagtacggcccgctgatgcagctccggttcgggtcgttccccgtggtggtcggctcgtcggtggacatggccaagttcttcctcaagacccacgacgtggtgttcacggaccggccaaagacggccgccggcaagtacaccacctacaactaccgcgacatcacatggtccccctacggcgcgtactggcggcaggcgcgcaagatgtgcctcaccgagctcttcagcgccaagcggctcgagtcgtacgagtacatccgcgccgacgaggtgcgcgcgctgctgcgcgacctgcacgcggcgtccagctccggccgcgcagtcatgctcaaggactacctgtccacggtgagcctgaacgtgatcacgcgcatggtgctcggcaagaagtacctgga

SEQ ID NO: 5734 - DNA, 567 bp, Zea mays
  misc_feature (248)..(248): n = any nucleotide
atgccgaggatgcgcgcgctgggctggtggacggtcatgatgacgacgctgccgctgcgcgcgatgcggcggagcacctgcaccaccatgaacgcgctggcggagtcgaggcccgacgtgggctcgtcgaggaacagcaggatggggtcgtggatgatgtcggtgccgatggacacgcggtggcgctccccgcccgacaccccgcggcgggcctcgtcgccgatgatggtgtcggcggcgcgggccancccgagctggtcgacgagcgcgtcgacgcgcgcgcgcttgcggtcggcgggcagcgcgcgcgggaggcggcactctgcggcgatccgcagcgtctcgcgcaccgtcagcatcgggtggactatgtcgtcctgcaccacgtgcgctgccatgccgtgcgttggactggccgtggccctgtatggttggtgtttgtgtgcgcgcctcgcctgtttagtcaccgtaggtattggtttagggagtggatgtgcgtttttgggttatttggtgtatatgctacccatccctttctgcacgtgtggggtgtgtctgcggtgcctg

SEQ ID NO: 5735 - DNA, 477 bp, Zea mays
atgcaacccgtttgccgctcgtgcttggcccccgcgcggccacagccggaggtaccccgcgcgcgcgcggccacggcgtgccaggcccgggccaccacgacgagccgcgtctgcgtctggcgcgcggctcccgcgcggcgcttgcgcgcaaacacgccgcgcggaggcgggacgacggagcccgtcgagccgcgcaaggacgggccggcgtcggcggtcgatcaggcggaggaggccgggctggcgcccgaagagctggaggtgctggaggaggcggccatcatgggggaggacgaggggcgccggcccaccgactacgaccgccgcgcgcacatcttcgaggagagctcgcgggtcttccgtgatctcaagcagcgaagcgacggcgacggtggcggcggaagcgagagccagagcggccgtggtggtgccgtgactactggtgccgcggcggaaacagctaacaagaacgcggtg

SEQ ID NO: 5736 - DNA, 348 bp, Zea mays
atgaataatgttaagcttcactttacagatggtgcacttagaataattgccaaaaaggcaatgtcaaaaaatacaggtgcacggggtttaagaactatccttgagaatattctcatggattctatgtatgagatcccagatgcaaaatctggggagaagcgaatcgatgcagtggttgtagatgaagatgcagtaggatcagtggaccaacctggctgcggagctaagattctttacggtgatggtgctttggatcaatatctatcccagataaaggtgtcaggagacggagtggggagcgaaatggatggggaagctgagctttcgtcatcgagagccattggcatg

SEQ ID NO: 5737 - DNA, 393 bp, Zea mays
atggtggtgaagatgtgggcgccgcaggtggaggtgctgcggcacgcagccacgggcgcgttcatgacccactgcgggtggaactcggtgctggaggcggcgtcggccggcgtccccatgctgtgctggccgatgtacgccgagcagagggtgaacaaggtgttcgtagtggacgagatcaaggccggggtggtgatggacggctacgacgaggagctggtgagcgcggcggaggtggagaagaaggtgaggctggtgatggagtctgaggaaggggagaagctcagggagaggctggcgttggcaaaggagaaggcggcagaggcgctggctgatggcgggccgtcgcggatggcgtttgaggagttcttgaaggatatcatgctcgccaaa

SEQ ID NO: 5738 - DNA, 774 bp, Zea mays
atggctgctgcatcatcatgccaggcggtgtcagcgtcgagagccccgaagtcggcgtactgtccagtaatggcagcaagctccggcgacggccatggagtaagctgctccatctcagcgcgagccgccgcctccgacctggcgagctccaccagctggcggatgacctcgtcagccagctcgccgccggagctccggctctccaagcggagcgtctggggctcctcccacgcggagccggcgcccaggatggtcgcgagatcggcgaccgaggggcacccggcgtacccttccaccgcgccaccgtcgtcgctactactgtcggcggcgccaccgccgtcccgctcatccttctcctcccccaagcggcagcctggcgcacaggaagccgccgcgcgtggcgggccgcagcggcagcggcctgcgcggcacccggcgcagagcggcgcccgggcgtggcgagtgaacacggtgttggcgccgtgcacgtggcggtcgcacggcaggcacagcctcgcggagtcggcccggcagtacaccaccgccggcatgcccgtgcaggagtcgcacgccggcgccgcctccttgccgccggctgcgtccgcggcggacatggcttccacctgcgacaagacaagacccggggaggatctggcaccgcacaggattgatggtgcgaggcgacgatggaggcgtacaggtagtacagcctcgcacgatctccaccgtcgcccgtcgctactactgggcgacaggcctgacggcctctatgag

SEQ ID NO: 5739 - DNA, 339 bp, Zea mays
atgcatggcgtaacgtctcccctcctcatggttctcaagcacaccagctgccctccctgccttgtttaccctgacttccgggttgccagtgatgttccggaagagctgaaacccgcagatgccgacggccacgcccgtcgccgcgaacagcgggtacacctcgggccggacccagcggctggccatctgagtcggagtctcttcgcactgggacgcggcctcgacggcggagaagcacggggaaagtggacaggcgacggcagagggggagtgggcggagtgggtggagcggttttatcggcgtgtgcggtgtggtcgtttggagcttctcgcccgaaa

SEQ ID NO: 5740 - DNA, 225 bp, Zea mays
atgtttttgagaagcctggtgttgacaacgactggcttcccgacagtcagcgttcctgtcttatcaaagacgatgcagtttaccttttgtgcactctcaagagcttgtccacccttgatcagaacgccttgtgacgcaccaactccagttgcaaccatcacggcagttggagttgccagccctaaggcacaaggacaggcaatcaccataactgatattccaaac

SEQ ID NO: 5741 - DNA, 498 bp, Zea mays
atgagcaggatctcgttgagcgtgccggacatgttggcgacgctggccgggaggcagccgccgaaggcgttgtgcgcgaggacgacgacggacgccggcgagttgccgaagttgtccgggagctggaagcggaggcggttgtggttgaggaagatggcgtcgagcgggcggtcgaagaggcgcggcgggacggcgccctcgaagtcgttgaagcggaggtccaggaagcgcagcgccgggaggtccaggacgacgtccgggaacttgccgacgaagcggttgttgctgaggtcgagctcgtggaggaggcggaggcggcggagcgcgcgggggaggacgccgcagaagcggttggagttgaggtggagcagggcgaggtcggcgaggaggccgagctccggcgggaggaagcccgcgatgtcgccgtggttgaggtcgaccccggcgacggcgagcgcgccgcggcggtgggtgccgccggaggggagcggcgcgcag

SEQ ID NO: 5742 - DNA, 474 bp, Zea mays
atggcgtcgagcttccgcagcgcggggatgttcatggcgaggtcgcgccgctgcgccgtggacatgatctccatcgtgattccgttctccgaggtgtggcgcgtgggcacgaactcgacgatgtggtcggtgacggagagcagccatcccacctccctcttccagcgctccttggtgtcgggcgccatgggctccagcttgcggtgctcgccaaagacggacgccgcgaggttggtgacggcgttggacagcgcgagcgcggacggcacgcccttgccggtgccggacatgtcctcgcccagcaggagcttggcgaacttctccttcatcacgtccagctctgagagcggcccgtcgcggccctggcgcaaccgcgccgccccggccgctgccgcctggctgttggcaaggggcggggtgccgccggcgccattgctatacatctcgcccgtgtcgctgccgctcctgtcgagg

SEQ ID NO: 5743 - DNA, 282 bp, Zea mays
atgcggccaaagagaagggcggcggcgatgcagagaagaagaaggccgacaagaagaagggaggcggtgatggaggagagaaaaatgccgacaagaagaagggcggcggcggcggcgataagaaggccgacaaggagaagggcactggcaaacccaaggaggaagaggaggaggaggagaagcccaaggaacccaaggaggagacggttacgctcaagatccaactgcactgcgacggctgcatggaccgcatcaagcgccgcatctgcaagatcaaaggtg

SEQ ID NO: 5744 - DNA, 546 bp, Zea mays
atgtcgctggctcgttacgacgccaacgtcctgctggccgcggtgaccgcgctctcggcggctgtcgctttcgtcgcggcgcttcacctctacgcgcggtgcctcctgcagcggcgcgtcgccctcgcggaaggcagccctcgcgtggtcgcgctgcagcggcagcgcccgccggacggctacgtggtggaggtcgtccgcatcgtcgaagacgcaagcgtgtgcggccagcaggctgcggggctggacgccaaggcgctgcgcgcgctgccggtgttcacgttggagtccgagcaggccaaggaagaaggcggcgtcgctgccgagctgcacgggcagtgcgtggtgtgcctcggggagatggaggatggcgagctggggaggctgctcccggggtgccgccacgtgttccacgttgagtgcatcgacacgtggctcggggtgagctcgacctgcccggtgtgccggacggcagctacgcctgccgctccgtcggccgtcggcgtggaccacggtggcggggaagagtccatagctgttgagtgc

SEQ ID NO: 5745 - DNA, 672 bp, Zea mays
  misc_feature (527)..(527): n = any nucleotide
atgaagaaggccacttcgctctccgagctgggcttcgacgccggcgacgcgtcgtcgggcttcttccgccctgtgtccggcgactcgtcgacgccgacgtcgcagcaccaccggcggaggctgaccaaggtgtcggtcatcggcgcgggcaacgtggggatggccatcgcgcagaccatcctcacgcgcgacctggccgacgagatcgcgctggtggacgcggtcccggacaagctccgcggggagatgctggacctgcagcacgcggcggcgttcctgccgcgcacgcgcctcgtgtccggcaccgacatgtccgtgaccaggggctcggacctggtcatcgtgacggccggggcgcggcagatccagggcgagacgaggctcgacctgctccagcggaacgtggcgctgttccgcaagatcgtgccgccgctggcggagcagtcccacgacgcgctgctgctcgtcgtgtccaaccccgtggacgtgctcacctacgtcgcctggaagctttcgggcttcccggncagccgcgtcatcggatccggcaccaacctcgactcgtccagttcaggttccttctcgccgagcacctcgacgtcaacgcccaggacgtacaggcgtacatggtcggcgagcacggcgacagctcggtggcggtgtggtcgagcg

SEQ ID NO: 5746 - DNA, 981 bp, Zea mays
atgactgactcgatcgaatacgttggaacgaatacaaatgatagaatattgatttatcataaacagagttacactatattaaagattccaaagtactttttagtgttagatctggaaggagatggtgctgttgggcgggttgtaaaactggacggtcctgccgttgagcggctgcgtggggcgcgcgtcgctcccgggcagcggcgccttgagcagctgcagctggtcctggctgatctggcgcaccttgccgaggacgctccagacgacgttctcggtgcatggcggcacggtgagggagcccgtgtagcggaagtagctgccggtgcgcttctgcagcgagcgcaggtggatgaggccggcctccacccgcgactcctcctcctcggcgaagtcgcaccggtcctgggccatctcgcccagctgccgcttcagctggtagtagaaggagtccggggcgcccagctggtagaggatcccgatgaccgccagcgcgccgtcggcgctcctgtggaccaggtgcagctccagcgggaacctctggccgttgatggtgtggtcggagggcgagtgccagtgcagcttctcgaagctgtacgccttgccgttcaccgtcaccgtcccaaccttgccctcgagcgccagcgtgatgtcgtggccgtcgttgatgagcgtggcgttggtggcgccgtaggtgcggttgagggtgtcgagggtggcggcggggacggcctgcttggtgacgatgtcgatcggcgactgctgcttcccctccccgcacagcttgtacgcggggctcagcttcccccagttctccggcccgttggggctccccgccgcgtacccgtacaccggcgccgccatcccgccgccatccgagagcgcgacggcgagggaggccgcggcgacgaggaggccgatgagcgcacgggcggaggacaccattgccggcgtgcacggatgagcacacgcactggtaga

SEQ ID NO: 5747 - DNA, 102 bp, Zea mays
atggccctccgccggcgctcccggcgcttgttgttctcccgctccttccacgtcggcgtccgccccagacctcccgccgccgccgccccggacgtcatggtc

SEQ ID NO: 5748 - DNA, 498 bp, Zea mays
atgaaacgtgatgcaccaataattgcggagtatttaggaggtgctgtgaactgtgatgcttaccatatgactgatccgagatctgatggtcttggtgtttcatcttgcatcaagcaaagccttaaagatgctggtgtggcgcctgaggaggtcaactatattaatgctcatgcaacatcaacccttgctggtgatctggcagaggtgaatgccatcaagcaagtcttcaaggacccatctgggattaaaataaatgcaaccaagtccatgataggacattgccttggcgcagcaggcggtttggaagccattgctactattaaagcgataactactggatgggtgcatccaagcataaaccaatttaacccagaggaagcagttgaatttgacactgtacctaatgtaaaaaagcagcatgaagtgaatgttggtatctcaaattcctttggatttggaggtcacaattctgtcgtagtatttgcaccatttaagcca

SEQ ID NO: 5749 - DNA, 741 bp, Zea mays
atggcggcggcggcggcggcggcggagcaaggcgtggacgccgcgaggaaagaggaggaggaggagcaggtagtgaatccgtgggaggtgtcggcggggaagggcggcatcgactacgacaagctcgtggaccagttcggctgccagcgcatcgacgacgcgctcgtggaccgcatcgcacgcctcaccgcccgaccaccgcactgcttcctccgccgaggcctcttcttcgcccaccgtgatttgaacgagatactggatttgtatgagaacgggcagaagttctacctctacacggggagggggccctcgtcggaggccctgcacctcggccacctcatccccttcatgttcacaaaatacttgcaggaggcttttaaggtgcccctagttatacaactgactgacgatgagaagtacttgtggaaaaacttgactattcaggaaagtaaaaggcttgcccgtgaaaatgctaaagatattatagcatgtggttttgacattgaaagaacattcattttctctgatttttcttttgttggaggtgctttttatgaaaacatgatgcaagttgccagatgtgtaactatgaataaggctattggaatatttgggttcaatcttgaggatcacataggaaaagttagcttttctccagtgcaggcaggtccatcattccctttctcattttcccatctcttcgctggcagggacaactgcggtgtcctatccccatgtgca

SEQ ID NO: 5750 - DNA, 390 bp, Zea mays
  misc_feature (95)..(95): n = any nucleotide
atggcagaagatgcagctgagacccttttgttttcaaagacaactactgcaaaggtgtggttaattggagatggtctagatgcttctgagcagtntaaggcacagaaagggacccagtttatcccatattcacagtttccaccaagaatggcacgcaaggacacctgcacctactcgacaactcctgcaatggttgtacctaaaacactacagaatgtgcactcctgtgagaattggctgccaaggagggtcatgagtgcatggcgcattgctggaatggttcatgcattggagggatggaacgagcatgagtgtggggacatcgtgctagacatggagaaaatgtggtctggtgctcttctgcatggtttccgccctgtggctcaagtt

SEQ ID NO: 5751 - DNA, 699 bp, Zea mays
atgctgccacagacacacgcgcacaacattcagaagaacgcaaacatgccctctgctagctcggttgttgcttattggcgattgatctgttctaactcagcggtccaacgagctgatcaccacccagtcgtagacggtggggctcctgggcccgacggccggctccggcccgtcggagaccttggttttccggcggaacctcctccagacgtccgccttgggcggggtagctgcggcgagcggcgagtcgggcgtgctggccggggaggacgggacggaggaggagctgtaggactcgacggagagcgacggcgggcgggcgatggtgatgctgcgcgtcaccgccggcgccggcgccggcgcgggagccaggatggacgacgacgaggaggaggagggggagaaggaggagtacttgcggagcttgccgaggccggagtccggtcgcgggccggccaccgtctcgtcccagagctgatcgaggaggcccattccggccaccaccagacccggacggacgcgattggttggctggcccctgcgtgccttggacgacgtatgcgctgcgcgcgcgtcgcgttgtcttgtcacgtcgcggcgagtgagggacggacgagagagaagagaagacgggcttgggttggcccggctgccgtgccgtgccgtgcctggatctggagcagttgtgggtggggcgga

SEQ ID NO: 5752 - DNA, 915 bp, Zea mays
atgtggtggtccaagttccacaagaaccagctcaagtacacgcgcggctacctcatcgagctgatgcactcggacaccatctacatctccaacctgacgctgctcaactcgccggcgtggaacatccacccagtctacagcagcaacatcgtggtgcaaggcatcaccatcctggcgccgaccaactcgcccaacaccgacggcatcaacccagactcctgctctcacgtccgcatcgaggactgctacatcgtgtcgggcgacgactgcgtggccatcaagagcggctgggacgagtacggcatctcgtacgggatgcccagccagcacatcgtcatccgccgcctcacgtgcgtgtccccgaccagcgccgtcatcgcgctgggcagcgagatgtcgggcggcatccaggacgtgcgcgccgaggacatcacggcgatcaacaccgagtccgccgtgcgcatcaagaccgccgtcggccgcggcgcctacgtcagggacgtgttcgcgcgccggatgacgctcaccaccatgaagcgggtgttctggatgacgggcgactacaagtcccacccggacgacaagtacgaccccaacgccgtccccgttgtcgccaacatcagctaccaggacgtggtggccacgggggtctacaaggaggcggcgcgcctccagggcatccagggcgcaccgttccggggcatctgcgtcgccaacgtcaccgccgacctgtccaagtccaggaagtacccatggaactgcgccgacatcgagggagtgtcggccaacgtcagccccgcgccgtgcgacccgctacagggcgcgcacgacggcgcatgcccgttcccgaccgacacgctgcccatcgaccaggtcacagtgcagcagtgcgcatacgacatcccggccaccaac

SEQ ID NO: 5753 - DNA, 1014 bp, Zea mays
atggacctcttccgcaagtgcatggagcccgtggagaaatgcctccgcgatgccaagatggacaagagcaccgtgcacgacgtggtgctcgtgggcggctccacgcgcatccccaaggtgcagcagctgctccaggacttcttcaacggcaaggagctctgcaagagcatcaaccctgacgaggccgtggcgtacggtgctgctgtccaggccgccatcctgagcggcgagggcaacgagaaggtgcaggacctgctccttctggacgtcaccccgctgtccctgggcctggagactgccggcggcgtgatgaccgtgctgatccctcgcaacaccaccataccaacgaagaaggagcaggtgttctccacctactccgacaaccagccgggggtgctgatccaggtgtacgagggagagcgcgccaggaccaaggacaacaacctccttggcaagttcgagctgtccggcatcccgccggcgcctcgcggcgtgccccagatcaccgtgtgcttcgacatcgacgccaacggcattctgaacgtatcagcggaggacaagactacaggacagaaaaacaagatcaccatcaccaacgacaaggggcggctgagcaaggaggagatcgagaagatggtgaaggaggcggagaagtacaaggcggaggacgaggagcataagaagaaggtggacgccaagaactcgctggagaactacgcgtacaacatgcgcaacaccatcaaggacgacaagatcgcctccaagctaggtgcggatgacaagaagcgcatcgagaacgccgtggacggtgccatcagctggctggacagcaaccagctcgcggaggtggacgagttcgaggacaagatgaaggagctggagggcatctgcaaccccatcatcgccaagatgtaccagggcgctggcgcggacatgggtgctgctgccggcatggacgaggacgcaccggccgccggcggcagcgccgctggccccaagatcgaggaggtcgac

SEQ ID NO: 5754 - DNA, 366 bp, Zea mays
atggcgtccgagcagggagtcgtgatcgcgtgccacagcaaggctgagttcgacgcccacatgaccaaggcccaggaagccggcaagctggtggtcatcgacttcactgccgcctggtgcggtccatgccgcgccatcgccccactgttcgtcgaacacgccaagaagttcactcaggtcgtcttcctgaaggtggacgtggacgaagtgaaggaagtcaccgcggcctacgaggtcgaggcgatgccgaccttccacttcgtcaagaacggcaagacggtcgcgaccatcgtgggtgccaggaaggacgagctcctggcccagatcgagaagcatgccgcgcctgcgcctgcgtctgcgtctgcc

SEQ ID NO: 5755 - DNA, 390 bp, Zea mays
atggcggctcagggaagtggcagtgctcgtggcagcggcgccgccgccgcgcttgcgctggtcctcctctgcgtgctcctccacggcgagttggccgagtcggcggtgtacacggtcggcgaccgcggcgggtggagcttcaacaccgccaactggcccaagggcaagcggttccgcgccggcgacgtgctcgcgttcaggtacaacgccaaggcgcacaacgtggtgcccgtgagcgcggcggggtacaagtcctgcagcgcgcccaagggcgtgagggcgctcaccaccgggaacgaccgcgtcacgctgaagcgcggcgccaactacttcatctgcagcttcccaggccactgccaggccggcatgaagatcgctgtcaccgccgcg

SEQ ID NO: 5756 - DNA, 996 bp, Zea mays
atgatgaggctgaagcagcacatgggcctggtctcctcccctacccctgccatcgtcgtgaggctcggcaacaacacaccccaccgccgccgagcaactcggtctcggatcgtgtcgtcctccgcctccgacgccgcgccgttcgagaagcccagggccgtggtcaagaaggtcctcgcgcagtcgcagcccgagggtcagggtgccaccgtccgtaggagcatcggcaggcacgagctccgcaacctggacccgttcctccagctcgacgagttcacagtctccaagcccgccgggtttcccgaccacccgcacagaggattcgagaccgtcacccacatgtttgagggggccatcacccaccaggacttcgctggtcacaagggcaccatcaggacaggggacgtgcagtggatgacggcggggcgaggcatcgtgcactcggagatgccggctggggacggcgtgagcgagggcctgcagctctggatcaacctctcctccaaggacaagatgatcgagccgcgataccaggagctggagcgcaaggacatcagccgcgcggagaccgaggacggcgtggaggcccgcgtcatcggccggggagggccttcgcgcgtggcgtcccccgtgtacacgcgcactcccatcatgtacgtggacttcaccatgcgacctgggtcccgcctgcaccagcctgtcccggagggctggaacgccttcgtctacgtcgtcgacggcgagggcgtattcggacgggagacggccacggcacaccactgcctcgtcctcggctccggcgacggcgtcagcgtgtggaacaggtccgccaggccgttaaggttcgtcctcgccgccgggcagccgctcggtgagcccgtggtgcagcacggacccttcgtcatgaactcgcacgccgagatacagcaggccatggaagactactcctacggcaagaacggcttcgagagggccggccagtggagctcctccgcc

SEQ ID NO: 5757 - DNA, 378 bp, Zea mays
atgtactgcaggatgatctgggactcgtttacggggcgacccgcgtggagcagcacgggcacggtcttgtgcaccgggttggagctgagcaggagcgcgctcttgttgctgaggtcgtcctccacgtactcgtacgccaggcccttgaggttgagcacgatgcggactcggatcacaaacgggctcgtccacaggcccagcaccttcaggtcgtcggctcccgccattgccagcgctctctctctctctctctctctctcgtccacagtccaatgggctttatatatagatagatatagatgtgagcagtgtctggtgacctgttttgttttgtttttttctctctctccagatttgtgcatctgtacttggccgtct

SEQ ID NO: 5758 - DNA, 576 bp, Zea mays
atgaagttgattgactttggtctgtcagattttattagaccagatgaaaggctcaatgatattgttggaagtgcttattatgttgctccagaggttctacacagatcatacagtatggaagcagacatttggagtataggtgttataacatacattctgctctgtggcagtcggccattctgggcaaggacagaatctgggatcttccggtccgtattgagggctgatcccaattttgacgattcaccatggccttcagtatcggctgaggctaaggattttgtgaagagatttctgaacaaagattaccgcaaaagaatgactgctgtccaagcactgactcacccttggttacgagatgaacaaaggcaaattccattggacatactcattttcagattagttaagcagtatctccgtgctactcctcttaaacgtttggcattaaaggcactatctaaggctttaagcgaggatgaacttttgtatcttaggttgcagtttaagctgcttgaaccccagagatgggttcgtgtcactcgacaactttcgggcggctctgacaagatactcaac

SEQ ID NO: 5759 - DNA, 708 bp, Zea mays
  misc_feature (248)..(248): n = any nucleotide
atgcacttcccctcgccgcgcgcgctcgccatggccgcgccggcggtcgcccgccctcgcctcgcccccgtggctcaccccgcctcgacctcttgcctgctggccctctgggaccggaggcgcgggcacggccgcgcggttgcggcggtgagggcgcgcgagcaaggcacggcgccgcccgacccggcggccttcctgcgccggccggaggtagcgacggtgacgtcgacggaggaggagagggaggncgatgcggggtcctcgtttgatggccccggggaggacgaggcgcccgaggaggaaggggttccgggggaggaggaaggcgccggagagggagtggggtgggattggaaggaccttatcctggaggacaccgtgccgctcgttggcttcgtacgaatgatcctccgctccggcaagtatgaaagtggcgatcggctgtgtcctgaacatgagaaggcgattttggaacgtttgcttccataccatccacaatataatgagaaaattgggtgtggtattgactacatcacggtagggttacatccagaattcgaaaactcaaggtgtttattcatagttaggaaggatggcgagcagatcgatttttcgttctggaagtgcgtcaaaggtctcattcggcaaaagtaccccatgtacgcggacagtttcattctcaggcatttccgcaggagacaagactac

SEQ ID NO: 5760 - DNA, 642 bp, Zea mays
atggcgaggatccacctctacgtcgtcgccgcggcctgcgccgtcgccctcgcgctcgccggcgacccggacatgctccaggacgtctgcgtggctgactacgcttccccggtcaagctgaacgggttcccgtgcaaggcgaacgtctcggcggacgacttcttcttcgacgggctgaggagcccgggcaacaccaacaacccggcgggctccgcggtgacggcggccaacgtggacaagttcccgggggtgaacacgctgggcgtctccatggcgcgcatcgactacgcgccgggcggccagaacccgccgcacacgcacccgcgcgccaccgagatcatcttcgtcctcgagggcacgctcgaggtcggcttcctcaccaccgccaacaggctcctcagcaagaccgtcgccacgggggacgtcttcgtcttcccccgcggcctcgtccacttccagcagaacagggggcacggccccgccgccgtcgtcgccgccttcaacagccagctccagggcacgcaggccatcgccatgacgctcttcggggccacgccgcccgtgcccaccgacatcctcgccaaggcattccgggtcggcagcggggaggtcgagcacatcaaggcaaacttcgcacccaag

SEQ ID NO: 5761 - DNA, 348 bp, Zea mays
atggtatttgcaaagtcaaaatctgaagaaagcatggatcagtggtctgaaataccttcagatgtggaatccttcagagaaggtaaaaggtacctcagtagcgaggagctgagtgacgttgatagtgccaacgttgttgtcatggacaaatacatggattcactcctctctgaccggaggaaccttccctacgctagctcctcggtgcgccgggattcagtcagacgaaaacctgcttcgtccgccgattacagccgccgacctccgcagccaactccacctgcatcgctgtcaaagaaggaatcgtgggatgtcattgaagattcggagttcgatatacttgacagt

SEQ ID NO: 5762 - DNA, 414 bp, Zea mays
atggcgagcgagggagccccctccggctccgtgagcctgggcgcgctggagtacatccatgtgcacaagactgcgcggctcgtggaggccgcggccgtgtcgggcgccgtcgtcgggggcgggggcgacggcgaggtcgagcgcgtccgtcggtacgcgcacttcttagggctcctgggccaggtggtggacgacgttctggacgtgacgggcacgtcggagcagctcgggaagacggcgggcaaggacgttgccgccggcaaggccacgtacccacggctgatgggcttaaagggagcgcgcgcatacatgggcgagctcctggcgaaggccgaggcggagctcgacgggttggacgccgcgcgcacggcgccgctgcggcacctcgcgcggttcatggcgcacagacagcat

SEQ ID NO: 5763 - DNA, 303 bp, Zea mays
atgtccgccaccgccgtcgtgtccatcctgcagggcgccgccgccgtgctcgccttctcccgcacctcggagttcctcgccggcgggctccggtcgtacgtccgcgaggaggacggcgccgtcatcctccgcatggtcggcgggctcggcgtcgccatcttctgcctcgagtgggtcgcgctcgcgctcgccttcgtgctcaggtactacgcctacgtcgacagggagtgcggcggcaacccgcagcgccgcagcgccaaggtcggcggcgaggacggcgccggcacctggcccttccaggtc

SEQ ID NO: 5764 - DNA, 384 bp, Zea mays
atgtaccgcattaatgatgacctggaatactctgttgagatctatgaatggtccggaacaagctggaagccgtatgttgctgatgatgtgcagcttcaatttttcatgatgagcccttacgttctgaaaactatgtcgactgacaacaagggtttgtattcaacaaccttcaaagttccagatgtttatggagttttccagttcaaagttgagtaccaaagactgggatatactggtctgtcttttacaaagcagattccagtacgtccttacagacataatgagtatgagagattcataacatcagcgtacccatactacaccgcctcattttcaacaatgggtgctttcttcgtattctcgtttgtgtacctgtaccacaaa

SEQ ID NO: 5765 - DNA, 690 bp, Zea mays
atgcgccacctccccaagcaccccaacatcgtcacgctcagggatacctacgaggacgacaatgccgtgcacctcgtcatggagctctgtgagggtggggagctcttcgaccgcatcgtggcgcgggggcactacacggaacgcgctgccgccttggtcacacgcactatcgtcgaggtcgtgcagatgtgccataagcatggagtgatgcacagggatctcaaaccagaaaatttcttgtttgcgaacaaaaaagaatcagcagcccttaaggccattgattttggcctgtctgtatttttcactccaggcgaacggtttacagagattgttgggagtccttattacatggccccagaggtactaaagagaaattatggcccagaggttgatgtttggagtgcaggggtgattctgtacattcttctctgtggtgtccctccattctgggcagaatcggagcaaggtgttgctcaggcaattatccgatctgtcattgatttcaaaagagatccatgggcaagggtctctgataatgccaaagaccttgtaagaggaatgctcaacccagatccaaagcgacgattgacagctcagcaagtgcttgatcacccatggttacagaacattaagagggctccaaatgtcaatttgggcgaaactgttaaggccagacttcaacattctctg

SEQ ID NO: 5766 - DNA, 867 bp, Zea mays
atggcaaccgtgttcctccgttccctcgccatggccatggccgacaccgcgctcccgccctcccacaagctcctccctacggtttccctgccgctcctcccctcgtccacccgcgccgcgccgctcctcctctgcgccagccgccgcctgccgcccgcgcccctcgttgcctcatccgacgccgtcgagacgaacattgaatgggtcgacgacgacgaggaggaggctggagaagccttcgacgaggagggtggggatgttgaggaggaggtgctggcctcaggcgacgagggtgagggggagtacgccgcggtggagccgcccgaggaggcaaaggtctacgttgggaacctcccctacgacatcgaaagcgagggactcgcgcagctcttcgaccaggccggcgtcgtcgaggtcgccgaggttatttacaacaaagagactggccagagccgtgggtttggctttgttaccatgagcactattgaggaagctgataaagccattgagatgttcaaccgctatgacattagtgggaggcttctgaatgtaaacagggcatctcctaggggcactcgcatggaaaggcctccgagacaatttgcgcctgctttcagagcttatgttggcaacttgccatggcaagctgatgactctaggctggtgcaattgttcagcgagtacggagaagtcgttaatgctgcggttgtctatgatagagaaaccgggcgctcacgaggattcggttttgtaacgatggtgtcgaaggaggaactcgacgacgctatctctgccctggatggacaggaattggacggccgccctcttcgggtgaacgttgcagcagagcgaccacagaggggcttt

SEQ ID NO: 5767 - DNA, 504 bp, Zea mays
atgccccagatcgaggttacctttgacattgatgccaatggcattgtaaaggtgtcagctagggacaaagccacaggcaaagaacaagaaatcaccatcaagtcttctggtggtttgtcagaggtcgaaattgagaagatggtgaaggaggccgagctacattctcagaaggaccaggaaaggaagtctcttattgatctcaagaactctgcagataccacgatctacagcattgagaagagtgtcagcgagtacaaggacaaggtccctgctgaagtcaccaaggagatcgagtctgctgtctctgatctgagggcagctatggctgaggacgatctggacaagatcaagcagaagctggaagcagcaaacaaggctgtttcaaagattggagagcacatgcaacaaggtggcggcagcggcagcgctggcggcagcggcagcagcagtggaggagaccagactccagaagctgagtaccaggacgcaaaggaagccaagatg

SEQ ID NO: 5768 - DNA, 387 bp, Zea mays
atgagtttcctgttcgggaagcggaagacgcccgccgagctgttaagagaaaacaagagaatgctggatcgatccatcagggaaattgagcgagagaggcaaggattgcaggcccaggagaaaaagctcatcactgagatcaagaaaacagctaaagaaggtcagatgggagctgtcaaagtaatggccaaagaccttattcgtacccggcatcagataacaaagttctaccaactcaaatctcaggtccaaggagtttctctaagaggtcagacactaaaatcaactcaagctatgggtgatgccatgaagggcgttaccaaaggcaatggctcaaatgaacaggcagctacatctgccagggttgcagaggataatgccacagtt

SEQ ID NO: 5769 - DNA, 561 bp, Zea mays
atgggctgcatcggggggaaggacggctgccaggggcggagcatggggtcgtcggtgaccatctccgggatgtcgacggcggcgccggccatctggagcacctcgaggacgccgcccagcgactgcaggcggccggccagctcggcgtggcgggcgcgcagcaccgcgttgtcgccgtccaccctgcccaggtcgcgctccagcgccgcggtgcgggcctgcgtcgccgcgttctccgcctgcaggcgggccacctccgccaccagctcctccagccgctgctgcttccgcgcgcgcgaccgccgcgccgactccctgttggacagcatccgcttccgcttgcgctcgtccgtcgtgtcgttgctgtcggggctcgagctccggcgtgacgacgacatggatgcttgtcttgtcggattgaatctgtttggtggggggtggggtggggggaggatggggagaaacaggagccctagagatggattcgaaagactatctcagagagaaagagagagggagagacggcgaaggatcagcagttggagaggggcgatgcgttca

SEQ ID NO: 5770 - DNA, 162 bp, Zea mays
atgaaggccagcagtttctggtcctcctcggacgtccacggccccttcttcagcccggcctccttctcgcagcacggcgaccgccccatcgcagcgccgcgcgcggcgaccacaggagcgagaaggacggcagggacacgcagctcgcccagaggtagacga

SEQ ID NO: 5771 - DNA, 381 bp, Zea mays
  misc_feature (35)..(35): n = any nucleotide
atgtccaaaaaactgtttggttatcttgggctttntacccttgttgctctattggtggattgtctgcccattaaccgcactagggcgttgagcccaaagttttcaatgccccactcagctaaagtggatgaagtggtggtggcaaatagcctaatcggaagtgtattatcagactacttctgggctctttctgttgtttggactactcccttggtggccactctaggcatgtctctcacaattccaatagcaatggttgctgatatgatcattcacgcccgtcactattcagcagtatatattcttggttctgtccaggtattttcaggctttgttatcgcgaaccttgcagatcgcttttctcgttctctagggctatca

SEQ ID NO: 5772 - DNA, 831 bp, Zea mays
atgctgctgatgctacacgaaactcttcctttcgtgaggccgacgagttcttgccgggacccaaaactctccgagaagagtgcctctgctttccacggtaaattgggatgcagtgcggtctgcagttcagcggaaggctatcgtgtacagaagccgcacattgttcacagctacaaagttagcttcactaggaccagccatcatctgtgtaaaagcttaaacgagagaactacaaggcactgcctgcatcggttccatgttaatgcttcgcccgatgacgacgacttccgctcatcgcgtaacatagcgatcagtttgttcaagcggtacaagaatgtcattgaccgaggaggtggagaaaacctaaatgagtttgtcagtgctggagtgaccgcttacgcactagggtgtacagatgaggggcttagaaaggaacttatggatattgaagattctggtctggagattgaaggcttagggtccttggggggcaccagcctcaagttcaaagtccactcctttgagatccgtgagtgcatcctgtggctcagtatagtgttcgtcacaatactgtgcacaccacaactaacagttatcaggtggtctccgaacccaccggtgtcagccgacgtcttgcatcagtggaaaggattctgtgctctaatcgcgaacgcttactatgtcaaaggaatggcatggttgccagtgaaaaccttgcagctggaacagatggctgtcacaggaagttcagagaaaccatcagtagttgctagtcgcatgcagttagttttcagcacattagaggtagtcagcccacagtggccaagagtg

SEQ ID NO: 5773 - DNA, 174 bp, Zea mays
atggcgggctccagctggcggagcagcgcgtcgtcgtggccgccgatctcgtacaggacggcgatcaccgcggccttgttctcggcgctctcgtgcaccaggtgcagctccatgtcgtaccggcggccgtcgacggtgtgctcggtgggcgagtgccagtgcagctgcctcagg

SEQ ID NO: 5774 - DNA, 612 bp, Zea mays
atgtctttcaccggcacgcaggacaagtgcaaagcctgcgacaagacggtccacatcatcgacctcctcaccgccgacggcgtctcgtaccacaagacatgcttcaagtgcagccactgcaagggcgtcctctcgattagcagctactcttccatggacggcgtcctgtactgcaagacgcactttgaacagctcttcaaggagacagggaccttctcaaagaactttcaaggtggagcatcttcaaacaagaacgaccaggcaaaggctccaagcaagctatcatctgcattctctggaactcaagataaatgcgcggcctgccagaaaacagtgtatccattggagaagatgactctggaaggcgaatcctaccacaagagctgcttcaaatgctcgcacgggggctgcatcctcaccacgtcctcctacgccgcgctcaacggggtcctctactgcaagatccatttctcgcagctgttcaaggagaagggcagctacaaccacctcatcgagacggcgcagaccaagaagaacgaggccgcggaggccggaccggagccaccggcggacgcaggcgcggctgagccggaagcacccgcgcaatcggcg

SEQ ID NO: 5775 - DNA, 807 bp, Zea mays
atgggatccctcgctaataacatcatggtcgtgggcgccgtccttgcggcgctcgtcgccggcgggtcgtgcgggcccccgaaggtgccacccggccccaacatcaccaccaactacaacggcaagtggctcaccgctagggccacctggtacggtcagcccaacggtgccggcgctcctgacaacggcggtgcgtgcgggatcaagaacgtgaacctgccaccctacagcggcatgacggcgtgcggcaacgtccccatcttcaaggacggcaagggctgcggctcatgctacgaggtgagatgcaaggaaaaacctgagtgctcgggcaatccagtcacggtgtacatcactgacatgaactacgagcctatcgctccctaccacttcgacttgagcggcaaggccttcggctccctggcaaagcccgggctcaacgacaagattcgccactgcggcatcatggacgtcgagttcagaagggtgcgatgcaagtaccccgccgggcagaagatcgtgttccacatcgagaagggctgcaaccccaactacctggccgtgctggtgaagtatgtggcggacgacggcgacatcgtgctgatggaaatccaggacaagttgtcggctgagtggaagcccatgaagctctcttggggcgccatctggaggatggacactgccaaggcgctcaagggccccttctccatccgcctcaccagcgagtccggcaagaaggtcatcgccaaagacgtcatcccggcgaactggagacccgatgccgtctacacttccaacgtccaattctac

SEQ ID NO: 5776 - DNA, 921 bp, Zea mays
atggacgccggcggaggcggcgtcttggccgccgtgctctgcatgctgctggtcttcgccatcttccttctcctcctctggcgccgccgctccgatgccgccaccgccgataaccaccgcgtcccgccccagcccctccaggaggatcaggtgctgcacggtcgcgcggcggcgcgacggatgcgtcggaggcctggggctgccggagcaggctcctctactgcgtcaactagccgcaatgctgtagaggacgacgcggagagtgacgatgaggaggtccccgaaggtcgcaacgtacccagatcctccaaaaaggagaagaaaaggcaagagcgagagatgcagcgtcaggccgaagaacctgcacgggattcatggaggagtaaacaagaccgatacgacgaaatgaggaggaagaaggatgaggagcgtgaggcacaagagaggcaattggaagaagaagctagggcacgaaaagcaaaggaggaggctgctgctgctttagagtttgagaaatggaaaggggccttctctgttgatgctgaaggtacaacagagagtgagacacaagacgatggtcagggtttgctccacaactttgtggaatacatcaagaagcagaagtgtgttcccctagaggacctagctgcagagttcaggatgcgaacccaggactgtatcaatcggattgttactctggaaagcatggataggttatctggggtgatggatgaccgtgggaagttcatctacatctccactgaagagatgaaggcagttgcagagtacattaggaagcaagggagagtgagcatatcacatctggccaacaactcaaaccagttcatcgatctggagccgaaggcccagtacgaggtggagagccagcaggatgacagtgcagaagcaggcacagaagca

SEQ ID NO: 5777 - DNA, 768 bp, Zea mays
atgagctgcagggagctgcaatcctgtgtgcgcaccggaagacggtgccgagagaagatggcccgctccaacttccgccttgtgatacatgttgctaggaaatatgaaggatgtggccttgacattcaggacctggttcaggatggatgctgtgggttgatgaaaacctttgagaagttcaacccgagcaagggatgcagattcccgacctacgcgtactggtggatacgccagtcgatcaaaaagtccatcttcaagaattcaagactaatccggttgccggagagtgtgtatgcacttttgaggaaggtgggcaaagcgaggatggaatgcataatggacggggagcagccgacgaacgaggtggtggcaaggcgtgctggcatcacgattgaaaagctggcgaaactgagagcgaaaaccaggaaagtacggtccatgcaggatcgagtctggtcagacgacggtgtgacataccaggagatcaccgaggaccccaacattgaaggtcctgaggtgagcgtggacaggctgatgatgcggcagcaggtgcgcagcttcctgacggggatcctgagcccccgggagaaggagatcatcgagcaccggttcggcatccacgacggccagcccaagaccctgcatgtcatcggcgacatgtacggcctgtccaaggagaggatccgccaggtgcagaacaaggccctggacaagctcagaaacagcatctcagcacagggcttccacgtctactttgatttgctaact

SEQ ID NO: 5778 - DNA, 447 bp, Zea mays
atggagcaaggtggcccaggaaggaaaagaagtcgtccagccaccaccataggaacagcagcagcaagagaaaatcaaagcacacaaggagtaggagtgatgatagtgaggaggatgaaggcagaagaggccgggacaggaagaagatgtccggcagatcgaagaagcatgaaagatctgatgaggctagcagcgatgacactgattcagatagacagaggcacaggaagagcaggaaggacaggaagaggaggagccaccgcaggagtgacgacacgttggatgagaaggatgtatctggaggtgaagaaaggaggcatcaacgtcaccagcggagccatcactggagggatgcatctgactgtgacaatggtgacagtgattctgcacatgacaagaagcaatccagcaggcggaggaggcattgccagtcagaaaacagtgggc

SEQ ID NO: 5779 - DNA, 240 bp, Zea mays
atggtgcccaccacgtgcgtcgtctgcgggtccacgccgtggtcgtacagccgcgccaggccgaagtcgcccagcctgccgttcatgtcgccgtccaggagcacattgctggccttgacgtcccggtggatcaccaccttctcccagtcctcgtgcaggtacagcaggccggcggcgacgcccctgacgatctggaacctctgcccccagtccaggacgggcctggcggtcctgtcgtcg

SEQ ID NO: 5780 - DNA, 270 bp, Zea mays
atggtggggcggcgtcgcgcggccctcccgacggctcgccgccggccgcgctgctgctgctgcagcagcccctcctccacgcctacgaggcccgcaaggacccggcggcgtgcggccgggaggcgcacgggcacggcttcggcccggaccccgacggcgccggcgccggcggaggcgcgagcttcgtgcggacctgcttcaatggcctcaacggcctctccggcgtcgggctgctgtccatcccgtacgcgctgtcggagggcgggtggc

SEQ ID NO: 5781 - DNA, 312 bp, Zea mays
atggtgcgcaaggcgaaggttgagttcgacgagcagccgccggataacttcgacccgaagaacccgtatgccgacccggtggcgatgctcgagtaccgggaacacctggtgcgagagaagtggatccatatcgagagcgccaagatcatccgggagcgcctccgctggtgctaccgcatcgagggcatcaaccaccaccagaagtgccgccacctcgtcgaccaatacctagaggctacccgcggcgtgggttggggcaaggatgcccgcccgcctgaactccacgagcccaagaagaccgtcaaggcggag

SEQ ID NO: 5782 - DNA, 558 bp, Zea mays
atggaggcggccttcgacgcctacttccgcgccgcagatctggaccgcgacggccggatcagcggccaggaggccgtcgccttcttcaagggctccggcctgccccagcccgtcctcgcgcagatttggacgtatgctgataaaaaccggtctggttttcttgggcgtgaagacttcttcaatgcactcaaacttgtcacagtagctcagagcggccgagaattgacacctgatattgttagatcagcattattcggcccagctgctgcgaaaatccctgctcctcggataaatgtttctacagctgctcctcaggcaagtagcgtagctaacctcccgaatgccactcaagcaccaggtcctgttcagcagactcctgtcgtaagagggacacaagggcttcctggtatatcgtcaaatccacaagtcaggccaccacaacctccaaatgcaaacactgcgccccctgctcagggtcagggagttgcctcaaggccacccgtaggaagtggtcccactgggataaacatactagctcaacacaccaagtctagcaac

SEQ ID NO: 5783 - DNA, 198 bp, Zea mays
atggaactggacctacgagttccagctcaaggaccagatcggcagcttcttctacttcccgtcgctcggccttcagcgagctgccggcgggttcggccccatcaccgtcaacaaccgcgccaccgtgcccgtccccttcgaccagcctcatggcgacatcaccctgttcatcggggactggtacaccaagggccacgt

SEQ ID NO: 5784 - DNA, 618 bp, Zea mays
atggccgccagcgtcaccgtggaaaacctcaaccccaaggtcttaaaatgtgagtatgcagtccgtggggagattgtcatccatgctcagcgcctgcagcaacaactacaaacacaaccagggtctcttccttttgatgagatcctctattgcaacattgggaatccccaatctcttggtcagcaacctgtgacattcttcagggaggttcttgctctttgtgatcatccgtgcctcttggaaaaagaggaaaccaaatcattgttcagtgctgatgcaatttctcgagcaaagcagattcttgcaactattcctggaagggcaacaggtgcatatagtcacagtcagggtatcaaaggactgcgtgatgcaattgctgctggaatcatgtcacgtgatggattccctgcaaatgcagatgacattttcattacagacggagcaagtcctggggtccacatgatgatgcaattactgattaggaatgagaaaaatggcattctgtgcccaattcctcagtaccctttgtactcagcctccatagctcttcatggtggagctcttgtcccctattaccttaatgaaaaactgggtgggggtttggagatctctgattct

SEQ ID NO: 5785 - DNA, 666 bp, Zea mays
atgtccgaggccgagatccgccagctctgcgtcgaggccaaacaggtgctgctttcgcagcccaacctcctccgcatccacgcgcccgtcaagatctgcggtgatatccatggacaatttgttgatctcttgaggctctttgatttgggtggttatcctccaacttcaacttatattttccttggagactatgtggatagaggcaaacaaagcttagaaaccatatgtctgcttctggcatacaagttgaagtaccctgataatatataccttttaaggggaaaccatgaagatgcaaaaattaacagagtttatggtttctatgatgaatgtaaaaggagattcaatgttcgactatggaagatattctgtgattgcttcaactgcttgcctatggcagcacttattgatgacaaaatattatgcatgcatggtggcctctcacctgaattgactagcttggatcaaataaaagatattgagaggcctaccgaaattccagactatggtcttctgtgcgatctcctttggtctgatcccagtcatgatacagaaggttggggggagagtgatagaggtgtttcttgcacttttggcgcagataagcttgttgaatttttttggagaagaatgatcttgaccttgtgtgcagagctcatcaggtgg

SEQ ID NO: 5786 - DNA, 699 bp, Zea mays
atgccgcgcccgcgccacggaaggcggaggccgagactggcggggacgaggacggttgtgctggtaaggcggcgccggcgaagaagcgggagcggagcagcgaggggaagcacccgacgtaccgcggcgtgcggatgcgggcgtggggcaagtgggtgtcagagatccgcgagccgcgcaagaagtcgcgcatatggctcggcacgttcccgaccgccgagatggccgcgcgcgcccacgacgccgccgcgctcgccatcaagggccgcgccacgcaactcaactttccggtcctcgccggcgtgctcccgcgcgccgcgtccgcggcgcccaaggacgtccaggccgccgccatgctggccgccgcgttcacgtcgccgtcgtcagcaccatcggagctcgacgccggcgcgccggcgccacgcgaagtgcccgccacaaagaacggctccccgtccgaggacgaggcaggcgctgaggcgccggtaccaccggcggcggcctctcagccagggacgccgtcgagcggcgtggacgaagagcggcagctgttcgacttgccggacctgctcctcgacgtccgggacgggttcgggcgcttcccgccgatgtgggccccgttccatgacgtgttggaggtcaatgcggaggaggagccgctgctttgggaatagcagtcttgcaattacaaagagggtc

SEQ ID NO: 5787 - DNA, 744 bp, Zea mays
atgaacgaagaaataaatctagctgatgcccctccccatcatcccgttgtactgtacccacgaaatcgggcgctgcagcttcatctgcgcgtaaaacctggcgatgaactcgtccgccttgacgtccaccccggcgtcctcgccgctgtccgctgccaccgaccgtccggccgagctcgcgcggaaggcctccgccaccacgcgctcaaaaagaatctcgccatcgccgcaaaagctcggctcttcgtcgtcctcctcctcatcatcgtcgaggtcgccgtagcagcacccggggccctcgcccgtctcccacgcggcggcggcggcgctgaagaagtagcggtcgtcgccgtagaggcccggcgtgtccggcacgtccggcgcgatgcaggggatgaggcggagcacgcgcgcggacggggtgcggaaccggaacgccggcgtctcgtcgatggagtactcgcgctcgccgcagcggagccggtcgccgcgcgcgccgcccagaccggcgaggccgtggccgtggcggcggagcgtgcggagcaggcgcaggcgcaggctgtgcgccgcgccgcccttccgcgcccacagcaccgccagccgcagcagccgccacgcccgcgtcccgaacgacggcctcttcagtcccgccgccattgcgctgcgtgtcggatcagatggcggcgcttcgttcgtcgaatgcgaaatgccgctggatcgtctctccgcactgctttgctcggg

SEQ ID NO: 5788 - DNA, 330 bp, Zea mays
atggggtcgtcgcagtcggggcacaggatggcgcggtcctccacgcagaacacgaggcccctccgctccttacacacgtcgcagagcggcttggcgtcggcgtcggattcgtcgccagagggctgggcgagggggatgcggcggtgcttgtgggcgagcttgttggcgcggtggacgcggcggtcgcaggcggagcagagcgcggcctcgtcggcgcagcagatcacggcggccggcgcggcggcgcagacgtcgcagagcatctgcatggcgcgagcctatcgcggatcggcagagctcagccgctcagggagagaatctggtaggcac

SEQ ID NO: 5789 - DNA, 282 bp, Zea mays
atggaggcggctacggcggtggcggtggcggctacggaggtggtcgtggaggctacggcggcggcggtgggggatacggtggtggaaaccgcggcggcggctacggcaacaacgacgggaactggaggaactgagcggtggggtccgctgaggcctagttatcttgttcgcttctgctaccgtgttcaccctagtctagagggggtttatcttcgtctgtggtcgtctcgtgtccgtttgtttcgtttcgtgttcattgttgttgttgcccatctgtgtttt

SEQ ID NO: 5790 - DNA, 834 bp, Zea mays
atgtcttccatggagctgctccacgccgtcgtcccggagaagcagagcgaggaggaggtcgcgcccgcagcgacgaccacgagcagcagcgccaccgccacgggcggggacgagggcgcccacgtgccccaggggtgggccaagaggaagcgctcgcgccgccagcgatcggaggaggagaacctcgcgctctgcctcctcatgctctcccgcggtggccaccaccgcgtccaggcgccgccaacgccggtcccgtccgcggcgccggccgccgcggagttcaggtgctccgtctgcggcaagtccttcagctcctaccaggcgctggggggccacaagaccagccaccgggtcaagctgccgacgcctcctcctcctcctactgccgccgctgtaactgtctcggcagcagtgcccgtcccggaggcccccgccccgatcaccgtcgtcgtcccgccgctgccgccagtcgaggtcggccgcgagccggccacgtcatccaccgccgcgtcctccgacggggcggcctcgagcagagtccacaggtgctccgtctgccacaaggagttcccgaccggccaggcgctcggcgggcacaagaggaagcactacgacgggggcgtcggcagcgccgccgcgtccaccgacgtcccggcggcgcccgccgagacgtccgccgaggtcgggagctccgccgcgcgtgcgttcgacctcaacctcccggccgtgccggagttcgtgttccggtgcggcaagcccggcaagatgtgggaggaggacgaggaggtgcagagccccctcgccttcaagaagccccgcctcctcatgaccgcg

SEQ ID NO: 5791 - DNA, 255 bp, Zea mays
atgtcgtcccggccgcagacgtcgaggtgccgtaccaggagccgcccgaggcgtacctcgccaagttcaggcggagctgggccatccactttgccttcctcatcaccacattcgcattctgcgtcgccgcctccgtcgcaatcctctgcttctagtacccttctatggctgctgcttctagtttttggatcgatctgtctaggagatcctggatccatctctctgcatagcataatgcatcagttgaatagagtc

SEQ ID NO: 5792 - DNA, 198 bp, Zea mays
atgacagacttgggtccggtgcagcccatggtcgtcccgagccctccgttgagcttgagcacaacgagcttgtccagcagcttcttcgtctcctcgagatcttcaggaggcgacgtgagggtatcgtacggcaccactacctcatcggtcggggtctggatcttgctccactcgatctgctccgcctccccactgagg

SEQ ID NO: 5793 - DNA, 750 bp, Zea mays
atgaggttcagctgcagcacaggggatgccatggggatgaacatggtctccaaaggtgtacagaacgtgctggactacctccaggctgacttccctgatatggatgtcatcagcatatcaggtaacttctgttctgacaagaagtcagctgctgtgaactggatcgatggccgtgggaagtcggtggtttgcgaggcggtaatcaaggaagaagttgtgaaaaaggttctcaagacaaacgtacaggctctcgtagaattgaacgtgatcaagaaccttgccggttcagctgttgctggagctcttgggggtttcaatgcccatgcaagtaacattgtggcagccatcttcattgctactggtcaggaccctgcacagaacgtggagagttcccagtgcatcaccatgttggaagctataaatgatggcaaagatctccacatctctgttactatgccatctattgaggttggcacagttggtggaggcacgcagctggcctcacaatctgcctgcttggacctgcttggcgtcaaaggtgccaacagggaatctccggggtccaacgcgaggctcttggcccacgtggttgcggggtgcggtcctagctggggagctgtcccttatctctgcgcaggccgctggccatctggtcaagagccacatgaaatacaacagatccagcaaggatatgtccaagacccttgcagaggaaacagacaaacccaagaaatgctgaataatatcaag

SEQ ID NO: 5794 - DNA, 411 bp, Zea mays
atgcatcgatcagcccctgcactgggtgatggcgctgcagccgcgggagtaggggttggcctcggcgccgggctggcagttgtagtaggacgcgccgcgctgcgagcagggcacgttgtcccggcgcagcgcgtcgtagccgatgtagccggagccgccctgcagcagccggcgcttggctgccgcccgtggccatggcgggggcttcgggcttgcccctcggggcggatgtccagcgaactccgaccgctcgccccaccgtcagtccctacttcggcccggcgcgcctggcgttgcgggccggctggagtaacctgccctgctgcttacgttcctgtgttgcgtgtgaccctccggttctgcgattcttcttcgtcctttatgtttcctctctcccgtcgccaccctatt

SEQ ID NO: 5795 - DNA, 759 bp, Zea mays
atgaccggcagtggaagcacgggcgccaatggcaagagccagagctccagggccaaggcaatgctgctcgccttgggcaagagctttcctgaccaagttctgcctcaggagaaggttgtggagagctacctccaagaaagcagctgcgacgatcccgccaccagggccaagcttcagcgcctttgcacgactacaacagtgaagacaaggtacactgttatgtccaaggagctattggataagcacccagagctgaagatggagggtactccgacactgacaccccgccttgacatctgcaatgccgcggtgatcgaccttggtgctgccgcagctcgcgctgcccttgacgaatggggtcgccctgcagctgatattacccacctcatctacatctcatcaagtgaccttcgtctcccagggggcgaccttcacctggctgctcgccttggccttagcccaaacaccgtgcgcacttcccttctcttccttggctgctccggtggtgctgctgccctccgcactgccaaggacattgctgagaacaatccagggagccgtgtcctagtaacagctgctgagaccactgggctaggcttccggccaccaagttatgaccgttcttatgaccttggtggggctgcgctgtttggtgatggtgcatcaaccgtgattataggaggcaggtcgcatgacaccaagagaaaatccttttcttggagcttgagttctccccggcggagttcctacctgggactg

SEQ ID NO: 5796 - DNA, 606 bp, Zea mays
atggggcttgactactacaagatcctgggcgtcgacaagggcgccaccgacgacgacctcaagaaggcctaccgcaagctcgccatgaagtggcaccccgacaagaaccccaataacaagaaggaggccgagaacaagttcaagcagatctcggaggcatacgatgtcctcagcgacccgcagaagcgcgcggtgtacgaccagtacggcgaggaggggctcaaggggcaggtgccgccgccgggcgccggcggggcgggctcaaccttcttctccaccggcggcgacgggccgacggtgttccggtttaacccgcgcaacgcggatgacatcttcgccgagttcttcggcggctccagccccttcggcggcatgggcgggagtgggatgcccggcatgcgggccggcgggtcgaggttctcctcgtccattttcggggacgatatgttcggctctgcgttcggcggcggcggcccggacgggcacggcatgcacaccggcggacgtgccgtgaaggcgccggccatcgagcggaagctgccgtgcagcctggaggagctgtacaaggggcaccaccaagaagatgaagatttccagggaaattgc

SEQ ID NO: 5797 - DNA, 576 bp, Zea mays
atggatatgcaaaaacggatagtattggatgctaagattgattatccagcagcatgtaatgcaatggaaacactacttgttcataaagatcttaacaagagtgagggacttgatgatctattagtggaacttgaaaaggaaggagtagttatttatggtggacctgttgcacatgacaagttgaaagtaccaaaggtagactcatttcgtcatgagtatagctcaatggcatgcacagtcgaatttgttgatgatgtgcagtcagctatcgatcacataaatcgttatggaagtgcacacacagactgcatcatcacaactgatagaagtgctgcagaggcctttctgcagcaagttgatagtgccgctgtgtttcataatgcaagcacaaggttttgtgatgggacgcgttttgggctaggtgctgaggttggcataagtacagagcgcatacatgcccgcggacctgttggagttgatggacttctaactactcgctgcattttgcgcggtagtggacaagtggtgaatggtgacaagggagtggtttacacccacaaggatcttcctttgcaa

SEQ ID NO: 5798 - DNA, 441 bp, Zea mays
atggacccgcaggtggaggtgcgccaggtggagcccaacgagttcttcctgcagatgctgtgcgagcgccggcccgggcgcttcgtccagatcatggactccatcgccgacctgggactggaggtcaccaacgtcaacgtcacctcccacgagagcctcgtcctcaacgtcttccgcgccgccaggcgggacaatgaggtggcagtgcaggcggacagactgagggactcgctgctggaggtgatgcgggagccgtacggcgtatggtcgtcgtcggcgccgcccgtggggatgagcggcagcggcatcgccgacgtgaagcatgacagcgtggacatgaagctcgatggcatcatcgacgggcaggcggcaccgagcgtcgcagtgggggtttcagaggatcactacggcggctacaaccatctcctccaatacctcgct

SEQ ID NO: 5799 - DNA, 402 bp, Zea mays
atggagataacatcaaagcctattgaattggatgaggtagacagagaaatcataaggcttgaaatggaaaagctctcattgaagaatgatacagataaggcctccaaagaacggctgagcaagcttgaagctgaactagaatctctcaagcagaagcagaaaagtctttcagaacattgggaatatgagaagtctttgatgactcgtataagatcaattaaagaagagactgacagagtgaacctggagattgaagctgctgagagagaatatgatttgaatcgtgctgctgaactgaagtatggaacacttttatcacttcagaaacagctggaagaggctgagaataaacttgttgaattccagccaatcagggaagtcaatgcttcgagaagaggtgac

SEQ ID NO: 5800 - DNA, 729 bp, Zea mays
atggcgtccgtggccgcggcggaggtcgcggcggcggcgctccggtcggtgctgtcgcgcgcgcagcaggcggcggcgcgggcggggcgcgcgccggggtccgtgcgcgtggtggcggtgagcaagaccaagccggtgcctgtcatccggggcgtctacgacgcgggccaccgctgcttcggcgagaactacgtccaggagctcatcgacaaggcgcctcagcttcctgaggatattgagtggcacttcattgggaatctgcaaagcaacaaagccagagccctacttgctggcgtgccaaaccttgatatggttgagagtgtcgatgatgagaagattgctaaccgtcttgatcgagtggtagctgacttgggaagaaaacctcttaaggttttggtccaagtcaacactagtggagaagaatcgaaatttggagtagatccctcaggatgcatggaactagcaaagcatgtcaaactgaactgcccgaaccttgtgttctctggtctgatgacaattgggatgcttgattactcctcaacccctgagaatttcaaggcgctggctaactgccgggaagaggtgtgcaaggagcttggaatacccgaagagcagtgcgaattgtctatgggcatgtcggctgattttgaacaagcgattgaaatgggaagcacaaatgtaagagttgggtcaaccatatttggtgcaagagaatacccaaagaagaac

SEQ ID NO: 5801 - DNA, 339 bp, Zea mays
atgaagcccatggcgagctcccgcgccgtgatccacgacatggacgacggcttcgagatcaagttcgcgcccgggaagcctgcggcgtggaagcacgacggcaaggccgacagcaaggggagtcgtcagggccacggccagggccagggccagcgtcagcatcacggccagggccagggtcagggtcagcatcagccccagctcgttggcattcccaaaggctacgccgtgccggtgcccgtgcccaaggactacgcgggcttcagataccctgcggaagccgtggtcaggcaggggcagatcaggggcggggcattcgttccagcgaagcctggcaca

SEQ ID NO: 5802 - DNA, 405 bp, Zea mays
atgcattgtaattacacctcctgggacctctcctactggaacacgggactctgcaagtgtccgattattctccaatatccttccagcattgataagcttcaagtcattaacagtttttggagttatatccttatcttgcggccaccgagcgaggatgaactccttgagcgaggagaccgtggtggagggatcgtacttggtgggcccgatgtccgtgccgtcgaagagccggaacctgacctcgatcggctccttcccgccggccatatcctccccgccagatcgccggcggcggcccaccacacctccccttcccaagatccaagccccggatcaaaggcccataggagcaaggaagcggccaaaaaaaaggaaatccacagaaacacgcgcaaggtgggaatt

SEQ ID NO: 5803 - DNA, 171 bp, Zea mays
atgcgacgggcaccggcgagccccacgtgtcgccggagccgccgcttgtactccttgaagtactccacctccttccacagcgggatcactgacaggacgccggcggtcttgttgtcgaggccggtgcctgcggaggcgaagcagacgccgcgggcgaagtcctggatgccg

SEQ ID NO: 5804 - DNA, 888 bp, Zea mays
atgtatgacgagttggctagcaagagcaatgttgaatatattgccggaggagccacccagaactctatcagggttgcccaatggatgcttcaaactcctggtgcaacaagttacatgggatgcattggaaaggacaagtttggtgaggaaatgaagaaaaacgctcaagctgcaggagttactgctcattactacgaggatgagactgctcctactggcacatgtgctgtatgtgttgttggtggtgaaaggtcattgattgcaaatctgtcagcggcaaactgttacaaatctgagcatctaaagagaccagagaactgggcactagttgaaaaggcaaaatacatctacattgctggatttttccttacagtgtcgcctgattctatccagctagtcgctgagcatgctgcagcaaataacaaggtgttcctgatgaacctctctgctcccttcatttgtgagttcttccgtgatgcccaagagaaggtcctcccgtatgctgactacatcttcggcaacgaaactgaggcaaagatctttgccaaagtcagaggatgggagactgagaatattgaggagattgctttgaagatctctcaacttcctttggcttcaggcaagcaaaagaggattgctgtgattactcaaggtgctgatccagtggttgttgctgaggatgggaaggtgaaaacgttccctgtgatcctattgcccaaggagaagcttgttgacaccaacggcgcaggtgatgctttcgttggaggcttcctctcacagttggttctaggcaagggcattgaagactgcgtgagggcaggttgctatgccgcaaacgttatcatccagcgcccgggctgtacttacccggagaagcctgacttcaac

SEQ ID NO: 5805 - DNA, 144 bp, Zea mays
atgtcgaagagccgggcggtgaggctgagcaggcggctgaagcagctcaacggctactcgtccctgtgcaacgtgctctgtctcatgtccctcacctggcacctcgtgcacctcgcgcgccgcctacacgcgggcaccgcctgc

SEQ ID NO: 5806 - DNA, 195 bp, Zea mays
atggtcatggctcttgatcatggctacgtagtgcccctggttggggccgctccccaggtggaccaccacggcaaagagggagtactcacagtcggcatcagcggagttgctgctgagcttaagctccaaggggtacaccactcggtacgacagcttcttgtgccggttaagctgctcgatgaacttgaagcgctt

SEQ ID NO: 5807 - DNA, 243 bp, Zea mays
atgcacttatctgtgaaaaaagatctgctaggcaggtcaacaaattttcttcagcatcttcgagatttctgtttcttctatagtattccagcaactgttcccggaatggagcacaataatacaatgcctggaggacgctgttgcagtagcaggtgttgccgaagttctcgagcccgaagtagcgctcgccctcggggaactggtcgccgaaggccctttcgagcttggagagtccggaaccaa

SEQ ID NO: 5808 - DNA, 204 bp, Zea mays
atgttcttgtcaaggaggacgttgctggccttgagatcgcggtgcaccaccctgagccgggagtcctcgtggaggtactgcaggccccgagcgatgccgttgatgatcctgtacctctgcccccagtccagctccagcggcggctgttcacgtccatcagcaccgaagagtgccaggtcgaggctccggttggggacgaactcg

SEQ ID NO: 5809 - DNA, 354 bp, Zea mays
atgctggacaagctgtgggacgacgtggtggccgggcctcgcccggagacgggcctcgagaagctccgcaaggccaccaccgcccgcccgctcgtcatcaacaaagacgcggacggcggcagctacaagcgggcgcagtcgatgccgtcgaccccgacgacgccggtgacgccgtcgtcgtcgtcgtcgtcgacgacgccgcgcggcgccggcaacgtgtggcgcagcgtcttccacccggggagcaacctggccaccaagggcatgggcgccaacctcttcgaccggccgcagcccaactcccccaccgtctacgactggctctacagcgacgagaccaggagcaaccaccgc

SEQ ID NO: 5810 - DNA, 495 bp, Zea mays
atgagctctcaccgtgtgaagtggaatgaggacaatttgtatgaaattgagtcaaacaaaccggtgaggcagaagataacagagccaaagacaccatatcacccaatgatagatgatgatggatcattgtcgccaacacgtcctttcgacaaatgtcttgatgagactgtccaggctgaagctatcttaacagccttaaatggtgtggcttcttcaagcattagcatttcaaaggatgatggttggggatcgtcagatgatgatacagatgccatagatcaagatgctgaccctgaagctgacacgacaaggttgagtttcaaggagcatcgccgtgcccactacgatgagtaccgcaaggttaaggagctgatgaggactggatcccttactgctgaggaggccgatgaggataacagagctgccaccagctccgaagacaaaggtgtggggaaaggagggccgaatgataacatgaagccctcgcctcaaaca

SEQ ID NO: 5811 - DNA, 516 bp, Zea mays
atggcggaatccatcgtctccggcgccgccgccccgccgccgggcgcgccctcgttctcctacctggccgtgttctccaactgcccgctcgtcgccgcggtgctcgccttcgccatcgcgcagtccatcaaggtcctcaccacctggtataaggagaaccggtgggacgcgaagcagctggtgggctccggcgggatgccgtcctcgcactcggccaccgtcaccgcgctcgccgtctccgtcgggctgcaggaggggttcgccagctcgctgttcgccaccaccgccgtcttagcctccgtggtgatgtatgatgcctttggtgttaggctacatgcagggaagcaagcagaggtcttgaaccagattgtgtacgagcttccatcagaacatccactagctgaaacaagaccgctgcgagagctgctagggcacacacctccacaggtatttgctggcggagtgcttggatttgcagtagccacatttacagcgatgattgctgggcttggtagt

SEQ ID NO: 5812 - DNA, 396 bp, Zea mays
atgacgttcaagcggaggaacggcggacgcaacaagcacgggcgcggccacgtcaagtacatacgctgctccaactgcgccaagtgctgtccaaaggataaggctatcaagcggttcttggtgaggaacattgttgagcaggctgctgtgagggacgtgcaggaggcttgtgtgcatgatggatatgttcttcccaaattgtacgcaaaggttcatcactgtgtctcatgcgcaatccatgcgcacattgtccgtgtccgctctcgtgagaacaggaggaaccgtgagcccccgcagcgtttcaggcgccgggatgatggcccaaggccaggtcagggcccaccgcgcccaggtgctgctgccacagcagctccccctgctgccgctcctcgtacc

SEQ ID NO: 5813 - DNA, 453 bp, Zea mays
  misc_feature (436)..(436): n = any nucleotide
atggtgtttggctcactgcggctccaccgcctggtcgtcggcggcaacggtaggcgctgcctctcggagaccgcctcggtgcactcgtacgccgcgattccaaactcctccacgagctgctccgccgtcagcgccatgagcgcgacgacgccctccgcggcccgggcctcggcctcgaccacctgctcggacacgagcccctccccgcgcgtgcagaaggcccgcttcaggctccggaagtcctcttcgaccatcgcgtggtcctccaccgtgaagctcctgtcgctgccgccggcgagcaggacgatgaggaacccctggaacgaggccttcatcacctcccggacggccaccggctgcgcgcggtccacgaggatggagacgagcagcgacaggttctgcttcagcgcgcggagcgcggggcggatgcgggcgncggcgacgcccccgacg

SEQ ID NO: 5814 - DNA, 759 bp, Zea mays
atgagtgagttgtcacttgctgatcgggcgaccatcgcaaatatgtctccggaatatggtgcaactatgggattcttcccagttgatggaaagacgctggactatttgaagcttactggccgaagtgatgatacagtggccatggttgagtcctacctgcgtgcgaataagatgttcgttgatcacagccaggttgacgctgaaagggtatactcttcctatctagaacttaacttggaagaggtagaaccatgtctatcaggaccaaaacggcctcatgatcgagtgacattgaagaatatgaagtctgattggctttcttgcttggacagcgatgtaggattcaagggttttgctgtccccaaagaatcacagggcaaagttgcagaattttcgttccatgggactcctgcaaagataaagcatggtgatgttgtaattgcagcaattaccagttgcacaaacacatcaaatcctaatgtaatgctgggagctgctttggttgccaagaaggcttgtgagttgggcctggaggtaaagccatggattaagacgagccttgcacctggttccggtgttgtgaagaatacttggataagagtgggttgcagaaatatctcgaccagcttggctttcatattgttggctatggttgcacaacctgcattggaaattctggagagcttgatgaatctgtgtctgctgcaattactgagaatgatattgttgctgctgctgtgttgtctggaaacagaaatt

SEQ ID NO: 5815 - DNA, 438 bp, Zea mays
atggttggattgctcgatcgatcgacctcccttcacaccaccgccgaccgaccgattcaggcgcggaagcagccggcgatgtggaagtggttgctgttgtggtgtcctcctccaccgccgccgccgccgccgccggagacgcggtggtggtggatgatgccctggacgcggcggaagtggtcgacgccgcaggggatggtgatggcgcccttctgctcgaagccgtactcctcctccgccgccttgagcagcgccacgaagagcgggtgcgtcaggtaccccacggggaccacgaaccgctcctcctcctcctcctcctccttatggccgccgcccgcgggccccaccacgcgcaccgccatacaccccttgggcggcatcgacgacccggacccgccgcccagcgacggcgcggacgagtgctgcttcttcagccgg

SEQ ID NO: 5816 - DNA, 870 bp, Zea mays
  misc_feature (718)..(718): n = any nucleotide
  misc_feature (794)..(794): n = any nucleotide
atgccgtggggcggctgcccgtgctcgctcgagccgccttcgtcggttatgtcgctggggacggcttcgtcgtcttcgcctgggtcgtcatccccggcgcagaggttgagatcaagcctgcccagcccggcgtcgtgccgtgcccgcttgccctcgccctcgccctcgccctgcggtgactccgtcttcctcttgagagcgccgtcggacgacgcctcgtcctccgaccacaggcgcaggttgattgggtcgctggcgccgccaggcaacttcgatgctaccaggatcacgatgcagccggagagacgcagcacttgtccggattcggcatccttcagggaaccgctcttcgacgcggcgaccaggcagtcggccacgtcgcacggcgcgttctcgacaccgtccacgactaccaccaccaccatctcgccgcccatctcagacgccctggatacaacatctgagcacagctcctccgcgcagctgtacttgctcgggtcggtgcggaccacgcgaccagccgagccgcagcacgtctctgcgatcaccgtgacagcgcgcccgcgtggcgctgtggtctctgcccttcacgtacagccacgagcccagcgtgccgtcgcgctctcggcggctactagcaaccaccgccttggcaatctccgcgacgacggcccgggctgccacgggatgttcctgcgcagcctctgccccagctggngcaccacccccgcggaaccgtcaccgcctcccgagcgcggctctgagatgtccccgagtccgagagcaggtgcctnccgagagcaagcgtgtttcccacgccctgacatgcttccctcgtcgtggactcaggcaccaacgagggggccccct

SEQ ID NO: 5817 - DNA, 780 bp, Zea mays
  misc_feature (686)..(686): n = any nucleotide
atgtgtttcagtgcaaggggtgctgtgagcagcacgcagtgtgtgctcacatcagatgctggcccagacactcttgtcgtccgaacatcctttcggaggaattatgctgatcctaatgaagtcgctgccgtcattttgggtggtggtaccgggactcagcttttccctctcacaagcacaagggccacccctgctgttcctattggaggatgttacaggcttattgatatccccatgagcaactgtttcaacagtggcataaacaagatatttgttatgactcagttcaactcagcttctcttaaccgtcacattcatcgtacctatcttggtggggggatcaacttcactgatggatctgttgaggtgctggctgcaacacaaatgcctggggaggctgctggttggttccagggcacagcagacgccgttagaaaatttatctgggtacttgaggattattacaagcataaagctatagaacacattttgattttgtcaggagatcaactctatcgtatggattacatggagcttgtgcagaaacatgtcgatgacaatgcagacataactttatcatgcgctcctgttggagagagtcgagcatctgactatggattagttaagttcgatagttcaggccgtgtaattcagttctctgagaaaacagagggtgctgccttggnaagaaatgaaagtgggataccagcttcctcaatttcggcattggatccccagcctgaatatccctatatcgcttcaatgggagtttacgttttt

SEQ ID NO: 5818 - DNA, 519 bp, Zea mays
atgatggcgatggcggcggtgtgccaggtgaggagcccggtgccgagggcggttgaggcggagcatgtggccgtggggtggccgccgtggctcgtcgccgtcgccccggaggccgtgcgcggatgggtgccccgccgcgccgagtcgttcgagaagctcgacaagattggtcagggtacatacagtaatgtttacagagctcgtgacctcgaaaaggagaagattgttgctttgaagaaagtgcggtttgataatttggaacctgagagcgtgaaatttatggcaagggaaatcctcattttgcgccgacttgatcatccaaatgttatcaaactagagggtctagtaacatcaagaatgtcctgcagcttatatcttgtttttgagtacatggagcatgatctagccggactagcttctttccctggagtaaaatttactgagtctcaggtaaagtgttacatgcaacagctcctccgtggtcttgagcattgccacagccgtcacattctgcaccgg

SEQ ID NO: 5819 - DNA, 384 bp, Zea mays
atggtgactcctggctccgactctaagaaggtgacacctgaggtgatcgcccagtacaccgtccgtaccctccagaggaccgtccctgctgctgtgcctgctgttgtcttcctctccggtggacagagcgaggaggaggccaccctgaatctcaatgccatgaacaagctcagcaccaagaagccatgggccctgtccttctccttcggccgtgccctccaggcgagcaccctcaaggcctgggctggcaaggtggagaacgtggagaaggctagagcggccttcctcgccaggtgcaaggccaactccgaggctaccctcggcacctacaagggtgatgctgccgccgacaccgagagccttcacgtcaaggactacaagtac

SEQ ID NO: 5820 - DNA, 315 bp, Zea mays
atgacccagaagccggcgtcggcgatagtgtcaaagctggagcagatcgttgagtcagagcgcttcatggtgaaaaaacaggacgggctggtgaagctgcaggggtccaagcaagggaggaaggggcagctcgcgatcgacgccgagatcttcgaggtgacaccggcctttcacgtcgtcgaggtgaagaagtcggcaggcgacacgctggagtatgagatgttctgcagcaagggcctaagaccttcactcagcgacatctgctggagcagccgatctgaggagaacatggctccttcagtggttcagccatca

SEQ ID NO: 5821 - DNA, 153 bp, Zea mays
atgacgaggcgccggtcgtcgaggacgtcaaggaagacgaggacgaggatgacgacgacgaggacgacgacgacgctgacgatgatgacgccgatggagacgccgccgcggcggcgccggccgacgaggaggaggaggtcgacgaggccggga

SEQ ID NO: 5822 - DNA, 756 bp, Zea mays
atgaacctgtggagcggcggcgggtggtcactcacgtcgtggcgggacgccgacgacccctcgacgggggaattccggtacgcgatggtcaggcgaggagggttgctgcccgagatcgtgatgctggactcgagcgacgccatcaagtaccgcacgggagtgtggaacgggcggtggttcagcggcatcccggagatgaactcgtactcgaacatgttcgtcttccatgtgacggtgagccagagcgaggtcagcttcagctacgccgccaatgccggcgcgccgccatccctttcccgcgtcctcctcaactacacggctgaggccgtgcgcgtcgtgtgggtgccggacaagcgagggtgggcaaacttcttcacgggaccccgagaagactgcgaccactacaacaggtgcgggcactctggcgtgtgcaatcagactgcagcgtcgacggcgtggccgtgcagctgtgtccagggcttcgtccccgtctcgtcgtcggactgggacgggagagaccatctggcgggtgccggcggaacgtgtcgctggactgcggcgacaatggcaccacgggacggctttttgtcgtttgcgggagtgaagctgccagacaccctcaactcgtcgctggacacgagcatcacgttggacgagtgcagggcgaggtggcctgccacctgctcctgcgtggggtatgccgcgggcagatgttcagggcgaggccataagttggaactggatcatcatgtggcc

SEQ ID NO: 5823 - DNA, 513 bp, Zea mays
atgctcggagaggtcgtggtagaaagcgtactccgcttcgtagtcgtggaggtccagctccgccttttggttgctgtggtaatggtgcttggcgtcggaagacttgccgaagccgaacacgctgactctgtcacacactcccaccgcgaccatgatggcctgcatcccggacgagtaatggaacatggcggcgtcgtgcgcgcggtcccactcctcgggcgcgcggccggtctcggcgacgaatcggcggagggagtagtacttgacgatgcgcgcgcagaggacgtcgaggcgggcgtcggtgacggagatgggggagccgtggcgggtggacgaggtggcgttgcaggcggcgacgtcgaggaaatgggcggcctggcagatgtagagcaggatggggacgccgtggccgtaggggtggcagaagcagccgggccggcgcgcgcagaggtggaggatgttgctgttgatgaaggagaagttggtcttgctgccgacgtgcgcggcgtagcc

SEQ ID NO: 5824 - DNA, 1098 bp, Zea mays
atgctgcgctgccacacgccaccgcaatgcgcccgcgcgccgctccgccaccacggaaggtgggagtcgcctccggcggcggcgcccgcggtggtagtgcggtgcgcgcggggtgcgccgcaggtgtccgggatcgaggcggcttcgccgggccacgcggctgtcacggcggcgttagctaaggcggaagggggtgacgcgcggcccagcctggccgagcggctgcggttggggaacctcctggaggacgggctatcgtacaaggagagtttcatcgtgcgctgctacgaggtggggatcaacaagacggccaccgttgagaccatcgccaatctcctccaggaggtaggatgtaaccatgcacaaagtgttgggttctccactgatggcttcgccacgaccactacaatgagaaaacttggacttatttgggtgacgaacagaatgcacattgagatctacaagtacccagcttggggtgatgttgttgagatcgaaacatggtgccaagaagatggaagaattggtacccgtcgtgattggatcctcaaggacctagctaatggtgaagttattggcagagctaccagcaagtgggtcatgatgaaccaaaatacacggagacttcagcgggtcagtgatgacgtgagggatgaggtgtttatgcactgtccaaaggcgccaagattagcattcccagaggaaaataatggcagtttgaagaagattccgaatctttcagaccctgcagaatattcaagacttggactagtgccaagaagagctgacctggacatgaaccaacatgtcaataatgttacttacataggttgggtcctcgaaagtgtacctcaagatataattgatacacacgagttacaaacaatcactttggattacagaagggagtgtcaacaggatgatatagttgattctcttacttgcatagaggaaggagaggagaaaagcatgaacggctctgcttctgcagcagcgcctcacaaagaagagcggcagcagttcctgcattgcttgagatttgcagccaacggacacgagatcaaccgtggccgtaccgtgtggaggaagctagctaga

SEQ ID NO: 5825 - DNA, 282 bp, Zea mays
atgcatgcagcaacaaacaagagcagaaaagtgcagacgttcggttcgacaacgacaacccgtgtggtcagttggcgttccttgtgcaccggacgacggtggcacggagcggccggcgcatcacgacggacagctcctgcttctcggcgaactccaccggctcaccggggacctggagccactcgaactcggcgacgagactggccacgaagaactcgaggtgcagcagagcgagcgccatcccggggcagatccgccgcccggcgccgaacggtatcatct

SEQ ID NO: 5826 - DNA, 384 bp, Zea mays
atgtcgttgtctcaatctgaatcggagactgagggctcagaggactacgaggactcgtcatccactcaaagtgacggcacaacggcaacagcggaggagaatggaagggccactcccaagcctattaggcgctcggcatccatggattctccattgtttctcgtagctgttcctgaagctcaggatgatgtcatgcagtataattgcaagttgccaaatgctcgagagatgaaggtcttcagggtcaaggagaaggaggcagcaggcacttcttcgacctcttgtcagtcaggccggttcaagattggcaggtccatgtcaagcagtgggcaggggtttttcttctcacggaatggccgctccagtggtgctgtgctgccactg

SEQ ID NO: 5827 - DNA, 720 bp, Zea mays
atggcgtcggaggtggaggacgacgcggcggtgccgggcgcgccgctggtcgccaatggtgcagccgacgtccgccggaggagggatcaggctaaggcgattttgtccaagcaggccgtcaagatcgccaccaaggccgagcagcacgagcgcttcatctttaaggtcacacacttgctgggtgttcttggatttgggggattttgctatctcttgggtgccagaccacaggatgtgccatatgtgtactgcctgttctatgtcatattcgttccgctccgctggatttactaccgctacaagaaatggcattactatctcctggacttctgctactatgccaacacctttctccttgtaatgattctcttctatccgaaagatgaaaaacttttcatggtttgcttctcgtttgcagagggtccacttgcttgggcattaattgtgtggcgttgcagcttagtttttggttcatttgacaaacttgttagtgtcctgatacatctcttacctgggattgttctattcactatccggtggtgggatccacaaacatttgctgccatgcacccggaaggaagagatgccagagtcacatggccatatgtggaggacaaatcatatatgtggacatggcttttttttgttccactagctgcttacaccctgtggcaacttatgtatttcctcatagtaatgtcctgcgccggcagagggttt

SEQ ID NO: 5828 - DNA, 549 bp, Zea mays
atggagcaaaccgaggcggcggtgagcggcgcgcttggagcgggagtggaaggtggcgacaagacggcgaggaaggcgctgaaggtggtggcggccgtggacgcgagcgaggagagcctgcacgcgctgtcgtgggcgctggacaacgtcgtgcggtgccacccggacgcgacgctcgtcgtcgttcacgcccagcacgccgccgaccacttcgcctaccccgtcgccgcgcacggtatcggcatcgtgtacgccccgtcctcggcggtggagtccgtgcgggcggcgcaggaggagagctcccgcagggtcgtggcgcgcgcgctggacatctgcaaggagaggcaggtggacgccacgggggccgtcgtggagggcgacgccaaggaggccatccgccaggccgtggagcgtatgcaggccgggcttctcgtcctcggcagccggggcctcggcgcgatcaaaagggcgttcctgggcagcgtgagcgactacctcatccatcacgcctgctgcccggtgctggtcgtcaggcccaggccgaccaag

SEQ ID NO: 5829 - DNA, 585 bp, Zea mays
atgaagaagaaagccgatgtgttctggattccgcagaggcggagtgtgcctacagcattcaagctcttcactggttctgcctggatggcactgtccaggccctttgtggaatactgcatatggggctgggacaacctacctcgcacagtgctcatgtactactcaaacttcatctcgtcgccggaaggatacttccacaccgttgtgtgcaacgcggaggagttcaagaacacgacggtgaaccacgacctgcactacatctcgtgggacaaccctccgaagcagcacccgcactacttgacggcggaggacctggaccgcatggtcgccagcgacgcgccgttcgcccgcaagttccacgaggacgacccggtgctggacaggatagacgaggagatcctgggccgcggcgcggacgtgccgactcccgggggctggtgcgctgggacgcgggagaacgggagcgacccttgctcggtggtcggagacaccgggcttgttgtgcctggccgtggagccgcgcggctgcagcggctggtcacgtcgttgctgtcggaggagaagttccacccaaggcagtgcaag

SEQ ID NO: 5830 - DNA, 216 bp, Zea mays
atgagattgttgaatgccaacttttcgactgcaaatgcaccaaggggaaatatgggtagactaaggcaacacattagcagtggccagtctcgcaatgatgtagcattaaaccaaaagccagatcttattaataagccatacttcatcaggttctcaataatgagcctgctattcaccgcaaccagaacaacaatacataggttgaaaaggcctgca

SEQ ID NO: 5831 - DNA, 306 bp, Zea mays
atgtggttgcagccgtggttcttctcgatggggcggcggcacatggggcagcgcttggtgttggccaccacccagttggccgtctccgagtcggacgcgttcttggccagccacgcgcgcaccgtgccgcacgacacgggccggtgcgcctcctcgccgcagcgccagcagaaggcgtgcctgcacccgcagacgacgtcgaccgcggaggccacggcctccgcgtcgcagccgccgaggagctccacggaccgggtgcagccggcgccgccgcaccacctgatccggcccccgctctcctccacg

SEQ ID NO: 5832 - DNA, 273 bp, Zea mays
atggccatggcgacgagcagcgcccaggtggtccactcgggcagcagcgtgaaccagaaggcggtgagtacggcgacggcgacgagcgcggcctggtggagcgcgatggggacggaggccgggaccagcgcggcgagcgcgagcgcccccgcggcgttgggcaggaggagcgcgaaggagacggcgtcgagcgggaggcggaggcgggagaggaggaggagcgcgacctggccgccgaggacgaggaggacggagagcgcggagaagccgagg

SEQ ID NO: 5833 - DNA, 786 bp, Zea mays
atggggaggtctccgtgctgcgagaaggcacacacgaacaagggcgcctggaccaaggaggaggaccagcgcctgatcgcctacatcagggcgcacggcgaggggagctggcgctcgctgcccaaggccgcgggactcctccgctgcggcaagagctgcaggctccgctggatgaactacctccgcccggacctcaagcgcggcaacttcaccggcgacgacgacgagctcatcatcaagctccacgccctgctcggcaacaagtggtcgctcatcgcggggcagctgcccggccggacggacaacgagatcaagaactactggaacacgcacatcaagcgcaagctgctcagccgcggcatcgacccgcagacgcaccgcccgctcagcggcggcgcgggcagcgcgctcaccaccacgtccagcaccgccggcttcccgtcccccgcgccggcgtccaggcccacgcccacgcccccgcccgccgtcgtcgtcccgcccaatgcgatcttcgcgcgcccggcgccgtcggaggacggccacagcagcagcggcgcgagcacggacgcgccgcgctgccccgacctcaacctggacctggacctgtccgtgggcccgccgcccaagacgccggcggccacgcccgcgtcgcagcagcggcggcggacgaccatctgcctgtgctaccacctcggtgtccgcggcggcgaggcctgcagctgcgagaccgcgtcgtcgctggcgggcttccggtttctccggccgctggaggagggccagtacata

SEQ ID NO: 5834 - DNA, 672 bp, Zea mays
atggcagccgtccggtccgacagggtccaccaccaccaccgccgctccgaggcgtcgtgcccggcaacctccgcggccgtggcggcggcgagggccgatgacgccctgcgccagcgcccgcgggggctcgtgcaggtccgggagcgggatcagggcccgctgtcgacggggcaccagcacctgcaccaccatcaccaccagctgcggcggtcggcggcgttcccaccccgccgcccggggccggggcgccgccctcctcagcgctgcgaaagcgacctcaacatcagggagcaccgctcctgcagcgaggtggccggcggcaccgcggcgggctgcgccgctgtgtgctgctgcttcccctgcgtcatggtggaggtcgcggtgctcgccacggtgcgcgcgcccgcggcgctgtgccgcaaggccgcccgcgtgcgcaagggccgcaggcgctctgcctccgcgggccaggccacggagatatacgagctcctcgtggacgacaccggcgtcgtcgaggtggatgccggcgccgccaatgcggtggcgctgcccgtgaagcccgccttgcagctggaggaaaagggggagctggagaaggaggtgtgggcgaggttctacggcaccggcttttggaggagcccgtcgcagctggacgacaacgacgacagg

SEQ ID NO: 5835 - DNA, 225 bp, Zea mays
atggcggcaacatcgagggcatcgcggtcaacttcacgcagccgcagccgagctactcggccttcagggaggccagcttcggccacgccaccttggagatcaggaaccggacacacgcatactacgcctggcaccgcaaccaggacggcgccaaggtcgtcgccgacggcgtctggctcactaacaggtactggatgcccaccgacgacgacatcaactgatgag

SEQ ID NO: 5836 - DNA, 321 bp, Zea mays
atggccatgtactctagcatttttggtggaattacaacaaacccttctgcaatggtgataccaatcgatgatcacatggttcatagaggtcatggggtttttgatactgcagctattatggatggtcacctctatgagttagaacaacaccttgaccgcttcctgaagtctgcatcgatggccaaaataccattacctttcaatcgctcaacaattagaagcatacttattcagactgtgagtgcatcaaattgcacccaaggatcactcagatactggttgtctgctggacctggagacttccagttattttcatctggc

SEQ ID NO: 5837 - DNA, 153 bp, Zea mays
atgatgagcgcgacctcggcgtcgcacagcagcgacagctcgtacgccttcttgagcagcccgttcctgcgcttggcgaacgtcacctgccggctgatcttgttctcgatccgcttcagctccaccttgccgcgacccatcttccctgctagc

SEQ ID NO: 5838 - DNA, 579 bp, Zea mays
atggccatcgcttgtcggatggaatgcaccccttccgtttcctccagaaggcctttatctcgcaagaagcgcggggcgttcagcctcttcagggcgatgtcctggtccttcggccggagcggcgacagcatgaagaagacagacgtcgacaccacgagccccaagaagagagccatcgcggctgctgatgacgattgcaagcctgccgatgacgagtcaacgtcgtggaagcgcctcgtggacggtatgcgcccgctccgcctccgcgggcagctggagtactacccgccgccaccgccgccaccgccgctgggccacgccgatgtgtaccatgacgtgatcctcccgccgccgtcgcaggcacggttcggcttcgagatcaaggaggtgggcatgaccagccgctacgcgtccgctgaggatctgcaccagatggacagcgaccaggaagagggtgctgagggtggcgatgacggtgacagcagttgcccacacgccatcgacatgcaggcggaggagttcatcaccaagttctatgagcagttcaagtcagaatcgttcaacggccgtgcctccgag

SEQ ID NO: 5839 - DNA, 237 bp, Zea mays
atgcgttgccggggtgggtgtcgagcggggcgtgttctggggccgtgggcttggggggggcaccgaggctttggaggtttggaggcgtcttgcggcctccaagaggtgtgtttcaggggtcagcgtggcgcggcatgtgcgcgggccggcggtgtttcggtgcgtgcgggtgacgtccgtggacgacggcggcggcggcggcggcaccaaacgggaaggtcgggtaccaggcggcgg

SEQ ID NO: 5840 - DNA, 747 bp, Zea mays
  misc_feature (384)..(503): n = any nucleotide
atgagtaaagggaggggggggaggggggggggaaaggaggagggagtgatggagaggagtgagggagagaggggggagggaagagtaaagaagaaggaagaaatagaaagggtagatatgttaagagtgacttatggttggaaatgtaaaaagacgaaacagaaagataataaggggcagagagggaagggggggggggggcggagtaagggaggggtagtaggtagagggcgagggaggtggagaggaaggagaggggagagagaaagaaaggggagagaggagaagggagagagcggagagagggagagagtgggcgtacagagaaggcaaaggagagcggatccaggcctgcggagtggtaaagtagtgtggaggggattnnnnnnnnnnnnnnnnnnnnnnnnnnnnnnnnnnnnnnnnnnnnnnnnnnnnnnnnnnnnnnnnnnnnnnnnnnnnnnnnnnnnnnnnnnnnnnnnnnnnnnnnnnnnnnnnnnnnnnnnccacgcgtccgctgccatcattcgagtcttccctggttgcggctgcacagggactcgatggcgtcctcctccctcccggcgcccgcggccggccgcgccgagctcctcaaggccttcgacgacgcccgcacgggcgtgcgaggcctcgtggagtcgggcgtctcgtccgtcccggagctcttccgccacgcggacccctacgcctccatcccgctcgccccgcccggcgtttccatccccgtcg

SEQ ID NO: 5841 - DNA, 174 bp, Zea mays
atgtcggaggggactgccaactgcgtggacatcctgatcgccatcatcctgcctccgctgggggtgttcctcaagtacgggtgcggccacgagttctggatctgcctcctcctcaccttcctcggctacatccccggcatcatctacgccatctacgccatcaccaagaacacc

SEQ ID NO: 5842 - DNA, 240 bp, Zea mays
atgagactcttgcattttgtagctaatgctgagctctattgcaagcttggcttgccatttgtgatgggcacaactggtgggaacaagcatttgctctacaagtcagtgcaagattcaaaaaattatgcactaatatctccacagatgggcaaacaagtgggtgcatttgttgctgctatgaaaatcatggctgagcagtttccaggggccttttcagggtatcatttaaaggtacaattc

SEQ ID NO: 5843 - DNA, 255 bp, Zea mays
atgcatcgtctactttttacattcccattggatcttgtgagacgtcgcatgcaattggaaggagcagccgggagggctcgcgtctaccagacaggactttttggaaccttcggacatattgtccgtacggagggttttagaggcatgtatagaggaatcttgcctgagtactgcaaagtggttcctggtgtcggcatcgtatttatgacatatgagatgcttaaggccatcctcacaggactggaatctgatgat

SEQ ID NO: 5844 - DNA, 531 bp, Zea mays
atggcgcgcgtgcgcgagccaccgctgatggcatctaacgacgactccgcgtcgctcttggtcgactacggatggtctccagcagcagccgcccctgctaggtcgtctcctttgcggcggctccttcacggcgggaaggcgacgacgaggccggccggcgccgccgccgccgccgccgccgccaccaccaccaccaccaggagccacgacgtcaagaggttcatatgctcgcctttcgcggctgtcttccgggcgatgtcgtgcgcgcgtgattctgctgtcagtacatgcgaccgaccagcggagcaggtcatccaccgccggggcggcccaccgcccttccccaggccaggaacgacgctacccaccccttcacccgcttctctaccaaggtacaagcccgccccaccagtcccgtcccgcccgcccacgaacattcataccagcagcgtgggtaataccaccgccaaccccctcccctccccccgaagggttttactctcattctttgtgctctttaaaattgttcat

SEQ ID NO: 5845 - DNA, 423 bp, Zea mays
atgtccttctacaccacggaggagcaggcctacgagctcttctcccgcgctggcgagatcaagaagatcatcatggggctcgacaagaactctaagaccccatgcggtttctgcttcgtactgtactactccagggaggatgctgaagatgctgtcaaatacatcagtggaacgatgcttgacgatcgtccaatccgtgttgatttcgattggggctttgaagaaggcaggcaatggggccgtggacgaagtggtggacaagtgagagatgagtaccgtacagattatgatcctggtagaggtggttacggcaagatggttcacagggaactagaagcaccaagagaactagttgactatggtggatctttccaaccaaatgcaccacctccctatgaaaaatgttaccggaacacagacact

SEQ ID NO: 5846 - DNA, 744 bp, Zea mays
atgagaggtaagaagaagagaaagtcgcagcacacggccgtgagacgcaaaaggcagacgaaaccagcaagggggatggaatggtgggggtttcgattacataaagcacgagagcacggggcgagggggatcgttccacccgacacggggaaagagccctcaaacatgcttattggacgagcaatttcttggccaaaggtgtcggacttcgggctgtccaagaacggcccgtggatgaaccagctgcacgtgagcaccgccgtgaagggcagcttcgggtacctggacccggagtacttccggtgccagcagctgacggacaagtcggacgtgtactccttcggcgtggtgctgctggaggcgctgtgcgcgcggcccccaatcgacccgcagctgccccgcgagcaggtcagcctggcggagtggggcatgcagtggaagcgcaagggcatcatcgagaagatcatggaccccacgctcgccggcaccgtcaacccggagtcgctcgccaagttcgccgagaccgccgagaagtgcctcgccgagttcggcagtgaccgcatctccatgggcgacgtgctgtggaacctcgagtatgcgctgcagctgcaggacgccaacccgcccgagggcgaggacagcgacggcaacagcgacggtgccacggcggagggcggcgccatcgtccccgctggcggtgccgtgcccgacgcgtccaccgccgccgccggggagctcttccag

SEQ ID NO: 5847 - DNA, 522 bp, Zea mays
atggtggtgcagaagcagaggagggtgccggccgaggtgttctggcctaaggtcgtgctcaagaagtggctcaacctcaagagcaaggacctggacttgggcgcctccttggccgccgattacgacgacgacgacgacggtagcgacgttgacggccaagagaactgcggctgtgacgacggcggcggcggcggcggcgctcgcaggccggacgatgacggcgacggcgcccagatcaccgacgatagcctggagagcgcgccgtacaagctgcggcggcggaactcggagacgctgcgcgcgcagtacatcaacaccaaagagctgagggtctgcgtcggcacctggaacgccggcggcaaggcgccgcccaacgacctctacatcgccgagtggctcggcactggaggcgacgccgaccccgccgacatctacccgctcgggattaagaaagtggcgctcgttcactgcctctacagcgtgccgcacgttcgacgtattcacgtggccgacaccgtgaat

SEQ ID NO: 5848 - DNA, 228 bp, Zea mays
atggtgtcgcgtcggcagtcgcccgacgctcaccggtcagctgaaacacccgcaccgcgcacagcgccggcatccgaatccgccggccccgcccgtccacctttgtgtgccggtctttggacggccgcttggccaccacgggccccgccgccgcgggggctgccggtacgagcgccttcttgtcgccgcccgcggccggcgacggctggggctgctccgggacgggcg

SEQ ID NO: 5849 - DNA, 273 bp, Zea mays
atgctgcaacacccacatcatgccaaggtcgcaccaaaattctgtaaacaatttggtaacgtgggcgatgtcatcaacaaggcgctatcagagtcaaggcaagaagtggaggctcaggctttccctggtccaagccacacaccgtataagataactcccacagatgttgacggctttgcagatgcactgcagaagatgggtttgagtgacgccgcagatgccgcagccgccgctgctgaaaacagggagaaaggtggagaaccaaaaggagag

SEQ ID NO: 5850 - DNA, 636 bp, Zea mays
atggagcagaaggttctcgtcgccgtgggcgtggccgtgctactcgtcgtcgtcctctccaagctcaagtctgtgctcgtcaccaagccgaagcttaacctgcccccagggccatggacgctaccattaataggtagcacccaccacctggtcaccagcccgtcgatctaccgggcgatgcgtgatctcgcgcaaaagtacgggccgctgatgatgctccggctgggcgaggtgcccacgttggtggtgtcgtcgccggaggccgcgcaggcgatcacgaagacgcacgacatcgcgttcgccgaccgtcacatgaacaccaccatcggcgtgctcaccttcaacggcaccgacctggtgttcggtccctacggcgagcggtggcggcagctccgcaagatctgcgtgctggagctgttcagcgtggcgcgcgtgcagtcgttccagcgcatccgcgaggaggaggtggcgcggttcatgcatagcctcgcggcgtccgccggcaccgtgaacctgtcgaagatgatctcgagattcatcaacgacaccttcgtgagggagtgcattggaagccggtgcaagtaccaggacaagtacctggacgccttcacaccgcggtccggcagacgtcggcgc

SEQ ID NO: 5851 - DNA, 318 bp, Zea mays
atgggcaccggctcttgttctgccctttgcctgttcttgccgagcgacgcgcgcttactgctcccgggctggttgtgcttggaggaggtggaagacgacgcggcgcgcttgcggctgctgctgcggaggaggacgtcgggcgcggcggcggggtccctggcgacgtggcggatgtcgtggcgacgtggtccgagcggcggcgaggcgtcggacgcggcgtcgacctgcacctgcacgatggggtcgcccttgagcacggcctcgacggcggcctggcacgcctgccactggcccgaccagagcaggccgacggagccg

SEQ ID NO: 5852 - DNA, 522 bp, Zea mays
atgaaggttttatactccggcttttccgaagggttcaccggaagaggtttcagccaggacagagagggtatcgatctcctaggaaattcatttcaggtcgatactgtggcttaccatctctcagttctgaaggatctgttcccacaaggcataaatgtgctgtctttattctctggtattggagaagcagaggtggctctccacaggcttggcatacagatgaacacggttatttcagtggagaagtccgaggtcaaccggacgattctgaagagttggtgggatcagacgcagacgggtactctgattgagatcactgatgtgcagacactgtcatctgagaggatcgaggcgtatattagaagaattgggggcttcgatcttgtgattggtggaagtccctgtaacaacctcactgggagcaaccgtcaccacagagatggtttggagggcgagcattctgcattgttccatcattattttaggatcttacacgccgtcaagtccatcatggagcgtttg

SEQ ID NO: 5853 - DNA, 504 bp, Zea mays
atgcagagggtgttctcgcgcatcgacgcggacggcgacgggcggatctcgccgtcggagctggcggcggtgtcgcgcgccatctccccgccggcgagctcctcgcacgggcggcgcgaggtggcggccatgatggacgagctggacacggaccgcgacggcttcgtggacctgggcgagttcagggcgttccacgcgcgcggcgttggcggcggcggggacgacggcgacgacgcggagctccgcgccgccttcgccgtgtacgacgccgacggcgacgggcgcatcacggcggccgagctgggcagcgtgctcgcccgcatcggcgaggggtgcagcgccgaggagtgccgccggatgatcgccggcgtcgacgccgacggcgacggctgcgtcgggttcgaggagttcaagatcatgatgcgcggcccccagccccagccccagcctcagcctcaggccggcgccggagtgacagccgtgccggacaaggccaagaaggag

SEQ ID NO: 5854 - DNA, 429 bp, Zea mays
atggcgatggcttacaagatggcgacggaggggatggacgtgaaggaggagtgccagcgctggttcatggagatgaagtggaagaaggtgcaccgcttcgtggtgtacaggatcgacgagcggtcgcgcgccgtgctggtggacagggtgggcggccccggggaggggtacgaggagctcgtggccgcgctgccaggtgacgactgccgctacgccgtcttcgacttcgacttcgtcagcgtcgacaactgccagaagagcaagatcttcttcatcgcctggtcaccggcggcgtcgaggatacgggccaagatcctgtacgcgacgtcgaagcagggcctgcggcggctgctggacggggtgcactacgaggtgcaggccaccgacccctccgagatgggcttcgacgtcatcagaggccgcgcgcaa

SEQ ID NO: 5855 - DNA, 573 bp, Zea mays
  misc_feature (77)..(77): n = any nucleotide
  misc_feature (203)..(203): n = any nucleotide
atggcgttccccgccagggtctctacccgggtgggcaacgagctgggcgccgggaagcccccggcgcgcccggatgncggcgctggtggcgctgtggtgcgcgctggcggtcggcgtgctgcacgtggcgtggacggtggcgctgagcaggcggtgggtggagctgttcacggcggatcccggcgtggtgcggctggcgtcgncggcgatgcccgtggtggggctgtgcgagctgggcaactgcccgcagacggcgggctgcggggtgctccggggcacggcgcgcccggccgtgggcgcccgcatcaacctcctctccttctacctggtgggcacccccgtggcggtgtacctggcgttcggcgcccgcgccgggttccgcggcctctggtacggcctcctgtcggcgcaggccacgtgcgtggcgctcgtcctcgtcgccgtcgtctggcgcacggactggcgcgtcgaggccatgcgcgccaagaagctggcggggctggagctcaccaacgacgccgaggaggagagcaggcgcctcgtggccgccaccggcgagcaggcggaggatac

SEQ ID NO: 5856 - DNA, 165 bp, Zea mays
atgccggcggtgtcggtggccaacgaccagcagtacgtggtagtggcggcggtcatcaccgtgcttgtggacccgcactcgctgtcgtgcaccgacgcgctccagcggtcgagcctggcgccccaggggcacgccgcgggcgcgctggtctgcgactggcaacgc

SEQ ID NO: 5857 - DNA, 351 bp, Zea mays
atgagcaaggagaagcaccaccgcgactggatcctccggcgctgctgcggctccatcgccgcctgcatcctgacgctggccgtcgtcgtaggcttcatcgtgctcgtcatctacctggcgctgcgcccctccaagccgtccttctacctgcaggacgtgcagctgcgctccatcgacctcagcgacccggcgctctccctcgacctccaggtgacgatcgcgtcgcggaacccgaacgagcgggtgggcgtgtactacaagacgctggacgcgctcaaccaccgtaccgcgacgaggcggcgaccggtacccgtgtcgaggcccggcgatctaccagggccaacaaggacg

SEQ ID NO: 5858 - DNA, 639 bp, Zea mays
atggggccgggtcaaggtcgtggggttgcggcactctgggggaggtactgggagcgcttgctcggcgcgggcagggcctccacaatcgtcgtgtacacgctggtgctgtcgtgggtgtccgacgtggcgcgggcccacagcagtgcccgccgcgctatactggatccatccggccaccgtgctcaccgtctacctgcacttcttccgcgccacggacggcgtcgacgcggccgtcgccgcggcgggcggcgacccgtgggcgggcgtccggttcccgggcctcccgccgctccgcgtccgcgacctgcagtcgttcatggtctccacctccgaggacgacccctacgcgttggtcgccgacgcgttccagcgagctcgtcgggcggctggacgtcggcgaggacagccccagcgtgctggccaacacgttgtacgccgtggagcccgaggcggtggcgtcgctgcgggagcacggcgtggacgtggtccccgtcggccccgtcctctccttcctggacgacgacgcggcggccggcgacaacaacgacctgttcacgcaggacggcaagggatacctcgagtggctggacgcacaggcgccgggctccgtggtgtacatctcgttcgggagcctgtcgg

SEQ ID NO: 5859 - DNA, 588 bp, Zea mays
atgtctcaaatccaaagcttctcgcggaacaactgtgtgctccttgtggtgctgtgtgggaagtatgctgagaagcgagcaccagcagcgaagtctgggctggaggcgaagcggccacggccgtcttacccattcccggagctcagctcagctgggcgattggaggtccacacactgtttaatcctacaccagagcagttcctcgaggcgcagcgggtggtgcagcccaacttcttgtacatccagggtcagcagcttgaggatgagaaggagattggctcacttgtgtggggggacgccgatgtctctgatccgcaggcgtttagcactcttatcagcccaccattcccaacgatagtatatctggaagttcctattggtgaaaaacttgcccaagcagttcactcaaaggggatcccatatgtaatttactggagaaattcattctcgtcttatgccgcatctcattttcgccatgcattgatgtcagtacttcaaagttcggtgagccatacttgggatgcttctcagcttggtcacgcatcctttcctctatattgggcaacaaaccatcatgtcccaaagcgt

SEQ ID NO: 5860 - DNA, 168 bp, Zea mays
atgcttcagaaattgttctgtgagcctgacaaagtgccgcagtggcctgatcgtatctttctgccagcgcacggtatgctcgatagaattcctccacaaatttcattagctctgaacgtttcttgtagtacatctctgctctccttgcaaaagaatcagcatcttcat

SEQ ID NO: 5861 - DNA, 432 bp, Zea mays
atgccgaagccgccgccgccgagggccaggtgcggcactggaccgcggacgtcaacggcatttccctccacgtcgccgagcgcggcgccgccgacgcgccggcggtcctcctcatccacggcttcccggagctctggctctcgtggcgccaccagatggccgcgctcgccgcccgcggcttccgcgcgctggctcccgacctccgtggctacggcgactcgtctgtgcccaccgaccccgccgcctactccatcctccacctcgtcggcgacttggtcgcgctccttgaccacctccaactcacaaaggtgttcgtggttgggcacgactggggcgcgatggtggcgtggcacctctgcctgttccggccggaccgggtgcgcgccgctgttgtcctggggatcccctacttcccccgcggccctcgcccga

SEQ ID NO: 5862 - DNA, 495 bp, Zea mays
atggtgaagacggcggcgagcagcagcagcgacgacgccgccgccgccaagaggaggacgtacaagggcgtgcggatgcggagctggggctcgtgggtgtcggaggtgcgagcgcccggccagaagacgcggatatggctcggctcccacgccaccgccgaggccgcggcgcgcgcgcacgacgccgcgctgctctgcctccggggctcggcggccgacctcaacttcccgctccgactcccgttcgacctgccccccgcggccaccatgtcgcccaaagccattcagcgcgtggccgccgccgccggcagcgccttcttctcctcctcctgcggcggtggcggcggcttgcccgcgccgccgacctttcggccacgccccgagaacaacggcccccgtgccatgaaaccaccgcgaacggttacgccccctccctgcgttttaccccccactcgtttaacctcccagccccccccgaccaacgtctcctctccc

SEQ ID NO: 5863 - DNA, 231 bp, Zea mays
  misc_feature (34)..(34): n = any nucleotide
atgtcgtcagcccacgcgtccgatttcgacgcancctcctccctctttaccgcggcgtgcacgcgtgcggagggcgcggatggcaccggcctcctccgcctccgcctccgcctccgcctcccccgttttcgtctgtgcctaaacccctgccccagcccgagggctgagcacgcacccggccctgacctcgagccccgtattcttgaggtcttcgtcgtgcacccccgcctg

SEQ ID NO: 5864 - DNA, 291 bp, Zea mays
atggagatgctgagcatgctgaaggtggggtacaccatcctgcgcagcgagacgcccgcgacagacctcgtcaacaccttcatggactgggcggcgcgcaggtcccttatgctcctggccatcttcctcccgccgtactacatctacaagctcaccacgtctgcgttcgctgctgccgtgccagaggacgtcgcagggaaggttgtgctcatcaccggcgccgcctccggcatcggccaggtatgccaaccagtaactcctttgtgtacgcgtatttttgctgaaacaaac

SEQ ID NO: 5865 - DNA, 270 bp, Zea mays
atggagcttcttttttgtttttcactgtgttttgggttgctgttggatgtgcctgttgcaagttgcaaaagagaaaaggcaatgatggtgtcccgtaccaacagcttgagatgggaggtcaggcaccaaactcttcgggggtggacaacaccgcaagcacaacagatggctgggaagacggctgggacgatgactgggatgatgaagaagcaccggcaggacctgtggataaaaagcctacgggcagtgtctcagcaaatggcctttcgt

SEQ ID NO: 5866 - DNA, 621 bp, Zea mays
  misc_feature (405)..(553): n = any nucleotide
atgatggagagggtcgaggacttagggctcagcctcagcctcagctcgtccctcgcgtctcctcgcactcaccatgtcgccaccatgctgctacgcgctccagcggcagaaggcagccttggcgcagcagctaggcctgcggccccgccaggtggaggtgtggttccagaacaggcgcgccaggacgaagctgaagcagacggaggtggactgcgagtacctgaagcgctgctgcgagacgctgacggaggagaaccggcggctgcagaaggaggtgcaggagctccgcgcgctcaagctcgtgtcgccgcacctctacatgcacatgtccccgcccaccaccctcaccatgtgcccctcctgcgagcgcgtctcctcgcccaacgggaactccgtagctgccannnnnnnnnnnnnnnnnnnnnnnnnnnnnnnnnnnnnnnnnnnnnnnnnnnnnnnnnnnnnnnnnnnnnnnnnnnnnnnnnnnnnnnnnnnnnnnnnnnnnnnnnnnnnnnnnnnnnnnnnnnnnnnnnnnnnnnnnnnnnnnnnnnnntgggaatcttggggcaagagaactcttactttctgggggggtggacattaattggggaccaacctacc

SEQ ID NO: 5867 - DNA, 351 bp, Zea mays
atggaatcattttttttagattggacaggttgtttccatttctccgagagcaaagaaccttggaagcagcccagaaatacgcccataccaaacttaatctgcccaaagaggtatcccacggcggttttatacttgaaaggattgatggtcgatggtccacaggccatctggtcctcacagacactgatgtccggaacaatccagcagttaccttcaactacttcagtcatccacaggatctcaatcgctgtatctatggtatcaagaccattgaaaggatactcaagacaaaccgtttctctgaactctctgctgatggtgctgggttatcgatggaaagggtgctcaata

SEQ ID NO: 5868 - DNA, 447 bp, Zea mays
  misc_feature (424)..(424): n = any nucleotide
atggcgggttggtgcgagcaggcggtggcgctgctacagcgccccgcggtggcggagatggccgtcgacgtgctgctctgcgcggtgccgatctgggccgccgtcatgatcggcctcgtcgtcggctggtcctggcgcccgcgctggacgggactgctcttcctcggcctccggagccgcctccgcatcctctgggtgccgccaggcctcggggcccggcggctctggttcgcctgcaccgcgctctccgcctgctccgtcgcgaccaagctcatctcctccgcattccgccgctgcagaggcaagcaccaggacagggcctcccccgacgatgatgccgctgcgaccagagacggcggatgtcgcgccgacggcagaacaaattttgagggtgagcatgatacagtcactgagaacgacctanaacatctcctgcaactttttaga

SEQ ID NO: 5869 - DNA, 501 bp, Zea mays
atgttttctaggtgctctttgccttcttctgggttgtccattgtgattagaggttccgacttgtcatccacaacaagaactgcagcagctccagcattttgtgcattccatgccttggttgtgaagaaacattctccgcggtcgacgaggacgaagatgggtcgtcccccagcctgcttgggcttgaacgagatgtcgaactggtcgaagctctggcacgccttccggttggacttggggtactcgacccatccgtgcagggtgcccccgtactgcggcaccccgaagttgccgatggcgcactcgtacttgcccttgagctcgtcgggggaggtcacctcgaggctgttcttctccaccacgaacctccccgccgccgcgtccgccaaggccagcgccaccacgaccagcagcgccagccacgcctgccccctcatcatggctcccttctgccccgatcgcaccgctctgctacagaccctcagcgcccagtggagttgc

SEQ ID NO: 5870 - DNA, 660 bp, Zea mays
atgtctggacgatcaaggcacttcacaatgtccacccttctcgctacgagcttcttctttgtactcctatgcagctcgctacaagtacgtggcgtgaactacacgttcgtgaaggacgcggcgctggcgcccagcgtgtcgtactacgactacatcatcgtgggcggcggcacggccgggtgcccgctggccgccacgctgtcggagcgcttccgcgtgctgctgctggagcgcggcgcctcgccctacgacgacgaccgcatcggggacatggcccgcttcgcggacacgctgtcggacacctccccgggctcgcccgcgcagcgcttcgtgtcggaggacggcgtcatcaactcgcgcccgcgggtgctgggcggcggcagctgcatcaacgccggcttctacacgcgggccagcgacgactacgtgcggggcgtcgggtgggacctgggcgccgccggggcggcgtaccggtgggtggaggacgtggtggcgttccagccggagctggggccctggcagggcgtgctgcagggaggtccgcttaacgccggggtcgagccgaacagcggacctacgctccgacacttcgccgtgttcctggtctgcgatttcatttttatactacaccgccgcgccggatttcgtctgcgcactgct

SEQ ID NO: 5871 - DNA, 636 bp, Zea mays
  misc_feature (518)..(518): n = any nucleotide
atggcaaacgcgccgaggatcctggccctcggcctgctagcgctcctgtgcgctgccgccggcccggccgccgcgcagaactgcggctgccagccaaacttctgctgcagcaagttcggctactgcggcacgaccgacgcctactgcggcgacgggtgccagtcgggcccgtgccgctcgggcggcggcggcggcggcggcggcggcggaggcggcggaggcagtggcggtgcgaacgtggctaatgtggtcaccgacgcgttcttcaacggcatcaagaaccaggccgggagcgggtgcgagggcaagaacttctacacccggagcgcgttcctgagcgccgtcaacgcgtacccgggcttcgcccatggcgggacggaggtggagggcaagcgcgagatcgccgccttcttcgcgcacgtcacgcacgagaccggacatttctgctacatcagcgagatcaacaagagcaacgcctactgcgacgcgagcaacaggcagtggccgtgcgcggcggngcagaagtactacgggcgcggcccgctgcagatctcgtggaactacaactacgggcccgccgggagggacatcggcttcaacgggctcgccgaccccacagggtggcgcaggacgccg

SEQ ID NO: 5872 - DNA, 561 bp, Zea mays
atggtggcagggctcatgaacgaacggctcaaggccctcaccacctcctttgcgcagcagatgggcagggagttccactactgcatcaagaacatggaccgggagtggaacactgccttcaatttctcttccgatcccgccttcctgacagcctgcatgaaggaaaccgacggtgacctaccgcagcgcgtgtgcacggccgcagagatgaagttctacttcgagagcttcctcgaaggcaacggaaggaagaactacgtgagaccgaacaagaactgcaaccttacttcatggatcgacgggtgtgagcctggatggtcctgcagcgccggcaaggaccaggaggtcaacttaaaagacgccgtcaacatcccgtccagaacccttgactgccgaggttgctgtgctggcttcttttgccctcatgggctcacttgcatgataccatgtgctctgggagcctactgccctcagtccactctgaataaaacaactggaatctgtgatccctaccactatcaaccacctgcccggaagcccaatcacacctgtgggcgacgc

SEQ ID NO: 5873 - DNA, 465 bp, Zea mays
atggcggcgtcggatgttgagtaccgctgcttcgtcggcggcctcgcctgggccacggacgaccactccctccacaacgccttcagcacctacggcgaggtcctcgagtccaagatcatcctcgatcgggagacgcagaggtcccgcggcttcggcttcgtcaccttctccacggaggaggcgatgcggaacgccatcgagggcatgaacggcaaggagctggacggccgcaacatcaccgtcaacgaggcccagtcccgcagcggccgtggaggcggcggcggtgggtacggtggtggccgtggaggcggcggctacggcggtggcggccgccgtgatggcggtggcggctacggcggtggcggcggctatggtggcggcggcggctacggtggtggtggcggcggctacggcggtggcaaccgtggcggcggctacggcaactccgacgggaactggaggaac

SEQ ID NO: 5874 - DNA, 435 bp, Zea mays
atgcgccccgacgtgaagcgggacagcttctcgcagcaggagaaggacgccatcgtcggcctccatgagatcctgggcaacaggtacgttacacacacaacacaatgcgtttcggattggtttccttacccaccaggcagcagccagcgcaacgtttgctcggcgaccggcacgtactctgttaacgggcggcggcgtccatgtgtttttttttcggacgcagatggtcgcagatcgcgtcgcacttgccgggccgaacggacaacgagatcaagaacttctggaacagctgcctcaagaagaagctgcgccagcgcggcatcgaccccagcacccacaagcccatctccgccgacgcggcggcattggagcagccggcgtcgcgagaccgcaagccgtcgttggccacagccgccgctggtggcggcctcgatg

SEQ ID NO: 5875 - DNA, 234 bp, Zea mays
atgacgaactcgaaggcccagctcatgtacccgccggcgcagccgatggccttggtgtcgcagtccaccagctcctgctccgacagggacaccagcttcccgttcttgatctggttgatgccctcgatggccgcaacggcggagaacgcccagcaagagccacagtccccctggctcttcaccggcgcgacagctcccttctctcgccagtccacgcttttcggtagatcagaa

SEQ ID NO: 5876 - DNA, 264 bp, Zea mays
atggctgtgccgaggaaggggacggcgacgccactgggcgccgtattctcgcctgaggagaccaagggggccgtggcgagggtggccgaatccatcgctggtcgccgcgccgagctcgggcacctactgtgctttgtctccgactacgcggaccttgcttccttggtgaccaggctgccagtcgaacctcttccacgaaatcatggtccttaccttctatacctcaagttctctttggtggtgttgcttttgtccgcgggcgtt

SEQ ID NO: 5877 - DNA, 348 bp, Zea mays
atgctcttcgtctgttcaagtcagcaaaatgtagagtatcctatggttgatgaggctaagtttgaccagttcctttttagagtggaagaagctcttcaccatgagacgcaaggcagcacagatggacccaagaatcatgacagcggtagaggtgaccagagaagtaacagtgagatcactccattggacaccggtttgaccggccaaaatgagttcagtaacaacagcgaggaaggtctctttgacaagtttaaatttaggaaaggggtagggaggctctgcaggcaccctgtgtttcagctgagtaggtccatgaagaagtcagatgaagcggagcaagcatgtgta

SEQ ID NO: 5878 - DNA, 636 bp, Zea mays
atgacgggctcgaaacccgcgcccgccgcctcgcagaaccctagcgcggtcccgcatcgtcgtcctcctcctcctcctcctcctcctcctccgccgccggtgacagcggttgcgagggtgcgcgaagaaggcgagctctcctccggcgccgacgacgacgagactctgcaaactcagctaggtgccgcatccattcttgggaagtttgtggaggctggatctcaagtgccatcggcaagtctcctcggtaaaggcagtaacaccttgattgtctcaaatgctctgaatcataaagcgtctgctccaagttacaagaagatcatgagggtgaatcaggggcaattcaaacctggcactaaccggaatctttcatggcagaagcctgtgtcaagtgataaccttctgataactttctcagatgatgatagtggggcagactctgggaagacagggcgagataaagttaggaaggctagctctcaaggtacacagagaacagggaacagtatgcaaactacgatcatgagagaggaaggatctcagccaaaaaaccttggttcaaaaataggtgcctgcacacttggcctgcttttccattcacacatagaaaatgtgggggcccggcagggcatcagg

SEQ ID NO: 5879 - DNA, 705 bp, Zea mays
atggagcgcggcgactgccagttcacggtggtgccgccgcggcagtacgacgaggcccagttcatgcaccagctgatggtggccggcgaccagcaggaccccgcgggcgcggggcggggagctgccgccgccggcggggagaggaagcggcggttcacggaggagcaggtgcggtcgctggagacgacgttccacgcgcggcgcgccaagctggagccccgggagaaggcggagctggcgcgggagcttggcctgcagccgcgccaggtggccatctggttccagaataagcgtgcgcggtggcgctccaagcagctggagcatgactacgccgcgctcagggctcagttcgacgcgatgcacgcccgcgtcgagtcgctcaggcaggagaagatcgcgctcgccgcgcaggtagacgagctgcgggggaggctgaacgagcggcaagaccagagcggcagctgcgaggtcaacgacgcggaggcggcggcggacgacaagaggaacaatagcaccagctccctcgtgcaggacgacggcgccacgccgccgccggctgcagtagacgcctccgaggactcggcggcgaccggcgagtactacgaccacgtcgcgtacgagtacgatggcctgcacgaccccttcgtttgcgccactccggacctgtgggatacgtggccgctgctggagtggaacgcggtggcc

SEQ ID NO: 5880 - DNA, 429 bp, Zea mays
atggcgctgtccctctccctcgcgcgccccgcgcccctcgccgtttccgccggcgcaggagccaggaagctacccgcagccagcctcgcattcccggcgaaatccttcttcggcgcgccgctggccgccaccgcggcctccgtcgcgtcgccgctcccgcgcaagccggccacctccaccacctcgctcgaggtcgtcgcggcggggaagaagggctacaagatgaagacgcacaaggcgtcggcgaagcggttccgggtgacggggaggggcaagatcgtgcggcggtgcgccgggaagcagcacttgctcgccaagaagaacaccaagcgcaagaagaggctctcgaagatggtgcaagtcaacaagagtgactacgacaatgttacgggtgcactgccctacctcaaagtgaataggaaagcaaac

SEQ ID NO: 5881 - DNA, 555 bp, Zea mays
atgggtttagcttggactgctatgggtggttctactttgtacatcgaaacaacaaaagtggaggaaagggaagggaaaggtgaccttgtgctgacaggacagcttggagatgtaatgaaagagagtgctcagattgcgcacacagttggcagaactgtattactggagaaagagccagataatcatttttttgcaaactcgaaggtgcacttgcatgttccagcagggtccaccccaaaggatggccctagtgctggatgcaccatgataacgtctatgctgtcgttagctatgggaaagcctgtcaagaaggacctcgcaatgacgggtgaagtaacattaactggaagaatcctcccaattggcggggtgaaagagaagacgattgcggcaaggagaagtgcgataaagacgctcatatttccggcagcgaataaaagggactttgacgagcttgcttctaatgtgaaggaaggactggaagttcattttgttgacacatacagtgaaatatatgatttggctttccagagtgacgccgggactgagatgatt

SEQ ID NO: 5882 - DNA, 333 bp, Zea mays
atgccgcctcgacccataggcgacggcgggacgctcccgccgtcgagcagcccgggcggcggcttcagcggacggaccttgggttcgtcggccgtcttgggcgtcggcttcgaagccctgatcttgcccttctcgaagagctcgtcggccgtcgtaagcgtctcggccggtgcggccttgccgaactcgaattctgtggcccacgccgcctcgtccgcagccacggccccggccccggccccggccccgccaagtcccctcttcggcgtaccaggcctttcctcccagtcgaacggcacggacgacccgcccgcggcgtacgtccggcgcggc

SEQ ID NO: 5883 - DNA, 255 bp, Zea mays
atgaacggcatcaaccccaacggcgggttcctgtcgtacgggaacatggagagctacgcgatgtgggtggcgaccggcgtggcgtcggccttcttcgcgtccctcgagcgctgctcctgcatccacctccacaccgcggaggacgacggcgacgaggaggaggaggacctcgaggaggcccgccgctccttctcccgcccgatccctgagtactactacgaccggtccggctcctccgcctccgtcgccaagatg

SEQ ID NO: 5884 - DNA, 639 bp, Zea mays
  misc_feature (23)..(23): n = any nucleotide
  misc_feature (170)..(170): n = any nucleotide
atgaggagatctacctgcatctngctgccggtcaaggagcaccagatcgtggagaccctcgtcccggggctcaaggacgaggtgatgaagatcacgcccgtccagaagcagacccgcgccgggcagcgcacgcgtttcaagcccttcgtcgtcgtcggcgacggggacgnccacgtcgggctcggcgtcaagtgcgccaaggaggtcgccaccgccatccgtggcgccatcatcctggccaagctctcggtcgtgcccgtcaggaggggctactggggaaacaagatcggccagccgcacactgtgccctgcaaggtcaccggcaagtgcgggtccgtcaccgtgcgcatggtgccggcgcccagggggtccgggattgtcgctgcccgcgtgcccaagaaggtcctccagttcgccggcattgaagatgtctttacctcgtcccgtggctccaccaagacactcggtaacttcgtcaaggcaacctttgattgtctgatgaagacctacggcttcctcactcctgagttctgggccgagaccaagtatgccaagaccccgttccaggagttcaccgacctcttggctaagccgacaaagggtcttctgatcgaggctcccaccgagacagtggaagct

SEQ ID NO: 5885 - DNA, 522 bp, Zea mays
atggcggaggacgcccccaacgccgtcgccgagggcagccagcccgcggcctccgagggatccgccgacgccgccctgccggctgccgcgggcgccaaggccgcggaggcgctgctcccgtcgctcagtatctggccgccgtcgcagcgcacgcgcgacgccgtggtgcgccgcctcgtgcagacgctcgcggcgcccagcgtcctctcccagcgctacggtgccgtcccggagcccgaggccgagcgcgccgccgtggccgtcgaggccgaggccttcgccgccgcctccaagtccgccgccgccgccgccgagtgcccggcctccgtcgaggaggggatagaggtgctccaggcctactccaaggaggtcagccgccgcctcctcgagctcgccaagacccggtccgccgctgctgcggcggcgcccgcgcccgccgaggggagcgcgcaggcgcaggagtccgcggaggcctcgtcggcgactgctccacctaccgaggaggcttgcgtaaacgaagaa

SEQ ID NO: 5886 - DNA, 501 bp, Zea mays
atgacgggatctcggcaggaccggcctgctccttctccttgtttcccccagttgcccgctcgcgcgtcgtctttcgtcgtccagggaggtagttacagagatggcgagtgcactgatgcctccccgccgcgcgcgccgcggcggcctccgcgcctactccagcggtgcagggcgtgggtggagagagaccccgccgcctgccctccgcgccgaccgccgcctcccgccccctccgcgccgcgcacggcgggcacggcgcccgcctggaacaacaaacggcgggtggcggagggggaacggcggcgcggcggaccaagtggtcccgcactctcgcgaggtcacaatcgccggccgccgggccgggcgaccgccctggagcagcgcggcgacggggtccgtcttcagcggagcccaggcgcacggggtatggccggtcgccccagggcgcgtgggctggggcgcgcccttccgcgcccgacggggcatcgcgcgggggagagg

SEQ ID NO: 5887 - DNA, 678 bp, Zea mays
atggcgttgagcggcagagctctgctcttgttcaagctgctgctgctgctgctggcgtgcctgctcttcctcttggagctgtcccgaggcaaggaagaagcattcagcctgaggaacctcccgcccttccacaaggccagcagctaccccgcggggtgcccgacgacgtacgactacatcatcgtcggcggcggcaccgcggggtgcccgctggcggcgacgctgtcgcacaggtacagggtgctgctgctggagcgcggaggctccccgtacggcgaccgcaacgtctcctacatgcagaacttccacatcgggctcatgaacatggcgccggactcgccgacacaggccttcatctccaccgacggcgtcatcaatgcccgggccagggtgttggcccgtgcgacccgcctccatgcccgccttctcaccaccgcccaccccactctttatccaccagccccgcctggcataaacacccgccgaacaccccacccccctctcgtcataacccccctaccccccccccccacctccctccccccctcccacccccaccccccctccttcctcccactcacccacccccctctctcctctccccctcctaccaccccccccccccccctcctccttccttcccacaatcacctccctatacttcatacctttacttcc

SEQ ID NO: 5888 - DNA, 432 bp, Zea mays
atgaaacacatgtatcttgttgaaagttaccgtgcatatcacatactactgcaaaaaatgtctgaaaacaagtgccatggttgtataaaactgaaggagcatatatcattgatgagggagcaaaagatgtgcaaggatcagttgaatgaattgaaattccaaatgtccgacgaggcacttcaacaaatgccagagtttcaagccagaattgatgtactaaaggtaatccgttacattgattctgatctagttgtgcaacttaagggtcgggtagcatgtgaaatgaactccggtgaggagttaatatcaacagaatgtgtgtttgaagatcaattggatgacctagaacccgaagaagctgtggctattatgtctgcattcgtattacaacaacgcaatgcttcacaaccatctcttactccaacacacggt

SEQ ID NO: 5889 - DNA, 369 bp, Zea mays
atggaaacacttcttattcctctcccctcctgccatccattgcagcacgcgtgccaggtccctgcttcaagcggagcagttggcttgggcgaggtggcaccggccgggcaggctgttgatgatgcccatggtgctgcaggcgcactcgtgcgacacggcgctcagcgcgctgcagcagtccgcgctggggtccggcgcgccgggcaccaggtacgcgcggcacgccaggaggcggttcagctgcggcaggcactgcccgccggcctgcgccccggcgccgcgcagcaccgacgacgggccggtgccgccgccgaggaccagcaggacgaggcacgcggcgaggagtgcgcggggggcggtggctgcttc

SEQ ID NO: 5890 - DNA, 432 bp, Zea mays
atgggaccccgcggcgtcgccctagcgctcctcgcggcggcgctcctccaggccctcgcccccgcgtcggcggcggcggcggcggcggcggcggcggggggcctggtgcggctcgcgctgaagaagcagcccgtcgaccagaacgcccgcgtcgccgcgcgcctctccgctgaggagaggcagcgcctcctcctccgcggcgccaacgccctgtgctcggccggcggcgacgacgactccgacgtcatcgcgctcaataactacatgaacgcgcagcactttggggagatcggcgtcgggacgccgcccgcagaagttcaccgtcatcttcgacaccggcagctccaacctctgggcgccgtcctccaagagctatttctcgacagcttgctacttccactcgcgctaccagcacggcgcagccagtactta

SEQ ID NO: 5891 - DNA, 186 bp, Zea mays
atggcgtcgccggcgaggacgggcggcccgggtgcgagtgcaacagctgcttcggcgggccggactgctcccttcgcacgcccaactgcaccgccgacgccgacagcgggaacccgttgttcctggagccgtactggcggcgtcacgcggcggccagcgccgtggtgttctccgggtggcaccgca

SEQ ID NO: 5892 - DNA, 468 bp, Zea mays
atggcggcgtcggatgttgagtaccgctgcttcgtcggcggcctcgcctgggccacggacgaccactccctccacaacgccttcagcacctacggcgaggtcctcgagtccaagatcatcctcgatcgggagacgcagaggtcccgcggcttcggcttcgtcaccttctccacggaggaggcgatgcggaacgccatcgagggcatgaacggcaaggagctggacggccgcaacatcaccgtcaacgaggcccagtcccgcggcggccgtggaggcggcggcggtgggtacggtggtggccgtggaggcggcggctacggcggtggcgggcgccgtgatggcggtggcggctacggcggcggcggcggctacggggccggcggcggctacggtgctgctggccgccgcctacagcggcgccaaccgcggcgacggcttaccgcaactccctccgcgaactggaggaac

SEQ ID NO: 5893 - DNA, 540 bp, Zea mays
atggcgtttccgaagcctactagtctagccgcgctagctgccttcgctgtggcggccatggcggcggcggcgatgatggccgccaccgcctcggcgcagaacacgccgcattttttcgtgaacctgcacaaccgcgcgcgcgcggcggacggcgtgggcccggtggcgtgggacgccagggtggccaggtacgcgcaggactacgcggcgaagcgcgccggggactgccggctggtgcactcgggcgggccgttcggcgagaacatcttctggggctcggcggggcgggcgtggagcgccgccgacgcgctgcggtcgtgggtggacgagaagaggaactaccacctgagcagcaacacctgcgaccccggcaaggtgtgcggccactacacgcaggtggtgtggcgcaggtccacccgcatcggctgcgcgcgcgtcgtctgcgccgccaaccgcggcgtcttcatcgtctgcagctacgaccccccgggcaacgtcaacggccagcgcccgttcctcaccctcgacgcggctgccaag

SEQ ID NO: 5894 - DNA, 579 bp, Zea mays
atggctgcggcagcggcgtccggaaggaggaagcggcggaggatgaggccagtgaagaacgaggaggaagtggagagccagcggatgatccacattgcggtggagcgcaaccgccgcaagcagatgaacgagcacctcgccgcgctccgctcactcatgccgccggcccacacgcaacggggcgatcaggcatccatcgtcggcggcgcgatcaacttcgtcaaggagctggagcagctgctgcagtcgctggaggcgcggaggcgttccccgcagtgcgctgcctacgccgtcgatcccgacgacgcggggccgttcgcggacttcctcaccttcccgcagtactcgatgtgcgccgtcattgcggccccagagaacactggccaccaccgtgagggcggcgccgtcgccgagcaggaggcgtccgggtcgaagccgtcggccgtggccgacgtcgaggcgacaatgggtggagagccacgccaacctgcgggtgctgtcccggcgccggccgaggcagctgctgcgcctggtgctgggggctccagggcccccgcctcaccgtggtccccctcaaca

SEQ ID NO: 5895 - DNA, 231 bp, Zea mays
atggatcattgggatcaacaccaggaagccaacgctaagtcagggtcaactgcactagcttctgccatagcagagtcagtcacagctgcagatcctgaagcaccaccctccattgacattgcaagtgcctgctgtagtaaatcgtcatcatcatgtggtcacagctatgtttgcagctatgggcgccctttcaataaccaacttcacgttgtaatgtgcagtttgcaggcc

SEQ ID NO: 5896 - DNA, 642 bp, Zea mays
atgcagggaggggcgacggccaagcagcaggcgcgagacggtgaccgcggcgcggcgaagacgccgacgacggaggggaagggcgacgccgccggcgccaaggctagcgccgacgtggcgaagggcgacgccgccgtcgccaaggctgctggggacgacgtcgtcgtagggaagggcgacgcaggcaacaaggccggcgccggggccatgcaccacggcctgtcggccgtggaggcgaaggactcccagaccatcgtcgcgctgcagtcgccggtgaccgtcatgcgccccgtccgcggcgacctcgaggagcacctccccaagccatatctggcgcgagccctggtggcgccggacatctaccaccccgacggcaccgcggccgacgagcacggcccaccaccacatgagcgtgttgccaacagcacgtccgccttcttgggaccgcgacgacaacgggcatcatctaccccttgggagacgtactcccggatgccgtgcgcttgggtacaacatgatcctgtctctcttgatcgctcttgtcgtgaacggacccatgagctatgccacgctgcctgggtggctgccgtcccctctgttcccgatctacgtccacaacatccacaagagcaagcatggcag

SEQ ID NO: 5897 - DNA, 552 bp, Zea mays
atgtatgcccgggcaaggttaaccataaaccctgacaaggtttaccggctggctatgacaaaactcaatacatctgctgccatccttgaagttatgggtgcgcccctaactggtactgatgtcagagcatatgttatgtctggaggaggcccgaaactgaaggacttcaaatttaagcttggcagtaaacggtgcttcctcattttccccatcaaaggatcagaaagaaggggcctcgtaagtgttgaggccaagaagaaaaatggacagtatgacatgaagctactagctgttgacataccaatggcatcaggtcctgaccagcggctgttcctcgtgggtgatgaacaagagtacaaggtcggcgggggcttgatatctgagctacgagacccgatcgtaaaagctatggccgcggagaaggagtttgactatcttgacgagagagaggatgaggaggacgagcggagggagcgtgaggaggcggagcaagaggaggcggaagcattgaggcgcgaggaggaaaggctgcgccaggcgggtgaaaaaccg

SEQ ID NO: 5898 - DNA, 753 bp, Zea mays
  misc_feature (127)..(127): n = any nucleotide
  misc_feature (315)..(315): n = any nucleotide
  misc_feature (466)..(466): n = any nucleotide
  misc_feature (586)..(586): n = any nucleotide
atgcggaagtggagtgaaagcaagcttggcaccgagttgcttcgtgctattgacaaggctggatatgaaaaaccatcaccaatccagatggctgccattccgctaggtctacagcagcgtgatgttnttggtattgctgagacaggttctggaaagactgcagcctttgtactccccatgttgtcttacattacccgattgccgcccataagtgaggagaatgaggctgagggtccctatgccgttgtgatggcacctactcgtgagcttgctcaacaaattgaggaggagactgtgaaatttgcaacctatctnggcatcaaagttgtctcaattgttggtggtcagtcaattgaggaacagggtttcaagattaggcagggctgtgagattgtaattgctacacctggtcggcttcttgattgcttggaaaggaggtatgctgttctcaaccagtgcaactatnttgtgctcgacgaggctgataggatgattgatatgggctttgagccgcaagttgttggtgtccttgacgcgatgccatcgagtaacttgaaacctgaaaatgaggatgaggaacttgatnagaagaggatttacaggactacttatatgttcagtgccaccatgcctcctgctgtggagcgtcttgctaggaagtacctccggaaaacccagttgtgtgacaattggtacagctggcaaggcccactgatctggatcaccccagaatgtgatcatggtgaaggagtc

SEQ ID NO: 5899 - DNA, 171 bp, Zea mays
atgtcatggcggacacacctgctattgaggcactgcataaaatggtccaagggaaatttagacaccttccagttgttgaaaatggtgaggttattgcgatgctggacattgcaaaatgtctgtatgatgcaatatcaagactggaaaaggcagcagagcaaggaagtgcac

SEQ ID NO: 5900 - DNA, 513 bp, Zea mays
atggtgaagtactcgcaggagccgggcaaccctaccaagtcggctaaggccatgggcagggatctgagggtccacttcaagaacacaagggagacagcctttgcgcttcgcaagttgtctttgaccaaggctaagcgataccttgaggatgttattgctcacaagcaggcaattcccttccggagatactgtgggggtgttggtcgcaccgcgcaagctaagtcgcgccactccaatgggcagggccgctggcccgttaaatcagccaggttcatcctggatttgctgaagaatgctgagagtaacgctgatgtgaaaggcttggatgtggacaacctctatgtttcacacatccaggtgaatcaagcccagaagcagaggcgccgcacctaccgtgctcacgggcgcatcaatccctacatgtcctcaccttgccacattgagctgatcttgtcagagaaggaagagcctgtgaagaaagaggctgacaacattgtcgcagcaaggaagcag

SEQ ID NO: 5901 - DNA, 1065 bp, Zea mays
  misc_feature (545)..(545): n = any nucleotide
atggtgctcaagttctccggctccggcaggcagtacaaggccgcggcggcgagcccgtcgttccggggcaaccgcttccaccgcaacagccgcctggccgcgtacacgggcgtcattgacgactcgggcttcacgtcggacggggccaccgagggctacggctacatgaggacgacgacgcacgcgaccggcgccaccgcgggaaccaaggtcggccgtggcttcccgcagcacgtcaggagcccgagcgcgagctggataccgagcatcggggaggaggacgatgaggaggatgaagaggttgtcgtcgttgaagaggaccgcgtgccgcgggagtggacggcccaggtggagcccggcgtccagatcaccttcgtctccaccgccggcggcgctggcaacgacataaagcgaatccgcttcagccgcgacatgttcaacaagtgggaggcgcagcggtggtggggagagaactacgaccgcgtggtggagctctacaacgtgcagacgttcagccggcagcagggcgtctcgacgccgacgtnctccatcgacgatgccacgcagagagactcgtcgttctactcccgcgccggctcgacgagggacagcccggtgatcctgccgtcgaagccgtgggcaggtagcaaccgatcgcccgcgccacctcgtgcagggcccacggccgcggcggccttcacggcccgagccgcgtgcaacccatcgtccagtgcggtgccggacccgtcggaccacgtgtgggcgcaccacttcaacctgctcaactccgcgccggcgccggcaccggccgctccgcacctcgacccgtcgcgcgctaccacgtcgtccctggacgaggcgtccgtgtccgtgagcaacgcgagcgacctggaggccacggagtgggtggagcaggacgagcccggcgtgtccatcaccatccgcgagttcggcgatggcacccgcgagctccgccgcgtccgcttcagccgggagaggttcggcgaggagagggccaaggtgtggtgggaccagaacaggaaccgaatacacgcgcagtacctg

SEQ ID NO: 5902 - DNA, 642 bp, Zea mays
  misc_feature (200)..(200): n = any nucleotide
atgagccccggcgccggtactgccaagaagcgtctcggcgttggcgccgtcgccggcggggggttcgcgctcgggtgcggctgcagggacgccaaggccgtggcggtggcggtggcatcgtcgtccgtgtcaccctactctgccgccaccagcgccacggagacgacgacatcgacggcgacgaccgcgacgtggcgcanggcgaggacgacgacgcacccgtcgtcggcgtccgggtccacgggcacgctcaccgtgccctccgcgtcgtcgtcgtccttcccgtgggaggacatggacgccgagggcgatggcgaggaggtggactgcaagagggagagctcggcggccacgacgagcttctccggcctgctgcgccagctcaacgagctcgagcagagcgtcgtgtcgttggggcggaagagcgccagcaaagatttacttgttcgcgccttcgccgccgccgttaccagcgcggtcattcagcgaagcaacgagctgtgcacagcgtggcggcgacagcaaagaaggtcacggcaacttctctccgccgccgcaggcgctgcgtcctttccagttccagactacgcagcagcaccggaagtcaaagagcatggacaaggacaaagcagcaagacaagt

SEQ ID NO: 5903 - DNA, 219 bp, Zea mays
atgatacaggctgctttcctgtatttcccagcaggaagctcaatccagttgccaccaacaatattgcaatcaatcatgaaacgaagggcaaaaagaatgttgctttcatatgtcagaaaactctttgaaccaaggccttcaattgttatgcccctttccaggataccacgacagctagcaaccatggtaggcagagcgactactatcttgaggaaaggt

SEQ ID NO: 5904 - DNA, 531 bp, Zea mays
atgggggcgatggcggcggctcgggggcagaaggcgctggtggctctgccgcagctggtgaagtcgctgcggagtgatcccgtttccggaagcgcacgactcagacaccttccgtctctcaggaggaccttctcgttgtacgaccagatcaacctcatcgacagcgtccccgaagacgagctccgattccagtcgtatgatgatactggattcaaaattaacaatataaaatatgaaggcagcttgttgattgtagagaacaagataatgacatgggcacccaaaacgttctcagagataactgctgaaagtttatcaatcttcaaagttgtgcaccctatcccagagatcttgattcttggttgtggaagacacatccagccggtcagtcctgagctacgaaagttcattcgttcaactggaatgaagctagaagcagtcgattcaaggaatgcggcttcaacatataatatcctgaacgaggagggcaggccggtggcagctgcagttcttccttatggagtcgcttgt

SEQ ID NO: 5905 - DNA, 369 bp, Zea mays
atgcagtcggctcagaggttacgagtgaggaagctgcagtacatcttggaggttgaacggagcgtcatcagtccccagatggaggtgtcggcgctgtcccttcgcgtggccttcatcgaccaccaccgttcaatgctcaccgtcggcaacaaccatctcaagcaaagaattgcggctctcgcccaggacaagatcttcaaagacgctcgccaagaggcggtggagaaggagatccagcgggtgcgccaagtgtaccagcagcagcaggtcaaggtggccaccaccggcggcgccgacatcgccaccgccgcctcgccgtcgatgcaggccaggcaagagctgctcgcgtgcgagggcgctgatattcga

SEQ ID NO: 5906 - DNA, 138 bp, Zea mays
atgaaatccagtgagtccaccaacaaaccagagagcaatgaaacaatatatcagaagccccaaagaagcgggagagtgtttgaaagccttccatactgttggataatcctcatccatgagaaacttgatgtacaaggc

SEQ ID NO: 5907 - DNA, 114 bp, Zea mays
atgagcttctccgtgagcgccttagggagccccattacactatcaattgtaccaacaatggcttccacgagaggtgaagttaaggggtgctccacaaggagaccaccagcgaca

SEQ ID NO: 5908 - DNA, 324 bp, Zea mays
atggatagcgttaaggtttcaattaatggtcatccaatctctgaaagagcccttaagaaggcagagaagaaagctggtcctgttgacccaggttcatattggtacgactaccgtgctggtttttggggtgtcatgggacgagaatgtatcggcattgtccctccatttattagagaatttaattatccgatggccagaaattgtgccggtggggattctggtgtttttgtcaatggcagagaactgcatcaaagagatttagatctacttgtaggaagaggactaccacggacatctggaaaatcatactctcttgagatggca

SEQ ID NO: 5909 - DNA, 240 bp, Zea mays
atgcagaacgaggagggtaagactgtggacctctatgtccccaggaagtgctcggccacaaacaggatcatcactgccaaggaccatgcctctgtccagatcaacattggccacttggatgcgaatggcctgtatgatggtcacttcacaacgtttgctctctctgggtttgtccgtgctcagggcgacgcagacagctccttggacaggctgtggcagaagaaggctgatatcaagcag

SEQ ID NO: 5910 - DNA, 378 bp, Zea mays
atggcggcggcggcagtttatggcggcctcaaggggaagcttggcgtcgaggatgcccccgagctgcagctgaatcgcatccgcatcaccctctcatccaagaacgtcaagaacctggagaaagtttgtgcggatttggtaaagggagccaaggataagcatctgagggttaaggggcctgtcaggatccctactaaggttctccacatcaccacccgcaaatccccttgcggtgaaggaacaaacacatgggaccggtttgagttccgcatccataagagggtgatcgacctgatcagctccccagacgtggtgaagcagatcacctctatcaccattgagccgggtgttgaggtcgaggtgaccgttgcagacgtg

SEQ ID NO: 5911 - DNA, 429 bp, Zea mays
atggtgcacgggaagctggaggtcctcctcgtctccgccaagggactcgaggacaccgatttcctcaataacatggaccccttcgtgatccttacctgccgcacccaagagcagaaaagcagcgtcgcaaatggagcaggaagcgagcccgaatggaacgagaccttcgtcttcaccgtctccgacgacaccccgcagctgcacctcaagatcatggacagcgacctcaccaacgacgatttcgtcggcgaagcaaccatccccctggaggccgtgtttcaggaaggcagccttcccccggcggttcacccggtcgtcaaggaggagaagtactgcggagaggtcaagctcgcgctcaccttcactccagcagcggaaactcgccgccctgatgacaacgaggaggggccgccttacagcagctggagt

SEQ ID NO: 5912 - DNA, 1158 bp, Zea mays
  misc_feature (803)..(803): n = any nucleotide
  misc_feature (899)..(899): n = any nucleotide
  misc_feature (902)..(902): n = any nucleotide
  misc_feature (953)..(953): n = any nucleotide
  misc_feature (983)..(983): n = any nucleotide
atgcatgcgaagatgacgaagcccgcagccatcgttgttgctgctatcgccgtcctctccgtcagcctgctggctgggtcgtcgtgccttgcccttgcgcggcccagcggcgacttctccatcgtgggctactcagaggaggacctgtcgtcgcacgagagcctggcggagctgttcgagcgctggctgtcccgccaccgcagggcgtacgccagcctggaggagaagctccggcggttccaggtgttcaaggacaacctgcaccacatcgacgagaccaaccgcaaggtgagcagctactggctgggcctcaacgagttcgccgacctcacgcacgacgagttcaaggccacctaccttggcctacggagcagtgttggcgatggtggtagtggtatcgatgacgacgacgagccggaggaggaggagggctacgagggtgtggacggggcgagcctccccaagtcggtggactggcggagcaagggcgcggtgacgggggtaaagaaccagggccagtgcggcagctgctggagcttctccacggtggccgccgtccagggcatcaaccagatcgtcacggggaaactcacggcgctgtcggagcaggagctcatcgaatggcgacacggacggatacaacggctgcaacggcggcctcatggactaccccttctcctacatcgcacacaaccggcgccccccacacggaggaggcctaccccgtacctcatggaggaaggcacctcccagcgcagcagcagcagcgagaagaagtggccgggatcgtcggaggacgccancgacgatgccgcggtggtcaccatctccggtacgaggacgtgccgaggaacaacgagcaggcgctgctcaaagcgctggcgcaacagcccgtcagngtncccatcgaggcctccggcaggaacttccagttctacagcggcggcgtcttngatgggccctgcggcacgcagctggaccancggggtagcggccgtcggctacgggacggcggccaagggccatgactacatcatcgtcaagaactcgtgggggcccagctggggcgagaaggggtacatccgcatgaggaggggcaccggcaagcgccagggcctctgcggcatcaacaagatggcctcctacccaaccaagaac

SEQ ID NO: 5913 - DNA, 603 bp, Zea mays
atggcggaggggaacggcggcagtcgcgccgaggctggcgtccgcgagtcctccgagccctcgccgaagcgctcctcgatccccgccatgccgcacgaagaatgcgtcgagggcatccgctccgcgctcaaacatcccacggtgcggttcctgagggagcggatggagagtgccgggtgcctggtgtggccgcgcctcatccgggcggcgacctgctcctccgccggcggctacgctagccagcaagggatacaagtttgctgcaatcacatgacctgtcaagatgagataactcaggtcatgattcatgaactgatacatgcttatgatgactgtgttgccaaaaatctgaactggacgaattgtgctcaccatgcttgctctgagattcgagccaatcaccttagtggtgattgccattacaaacgtgaattgttgcgtggtttcatgaagataaagggtcatgagcctgaatgtgtcaaaaggcgggctctgatgtctgtgaaaaacaacccatactgctcagagggtgctgcaaaagatgcaattgatgctgtatgggatatatgctacaatgacacacgcccatttgatagagcccca

SEQ ID NO: 5914 - DNA, 477 bp, Zea mays
atgaggacgcggatgccaaggattggttcaactgatgctattgatacatgggcaaaccagcacaaagataaaaagttgtacatagtattgataagcattcatggtcttatacgcggggagaatatggagctgggacgtgattcagatacaggtggtcaggtgaaatatgttgtagaacttgctagggctttaggttcaacaccaggagtatacagagtggatctactaacaaggcagatttctgcacctgatgttgattggagttatggggaacctactgagatgctcagtccaataagttcagaaaactttgggcttgagctgggcgaaagcagtggtgcctatattgtccggataccattcggaccaagagacaaatatatccctaaagagcatctatggcctcacatccaggaatttgttgatggcacttgtccatatcatgcagatgtccaaggtccttggagaacaaattgg

SEQ ID NO: 5915 - DNA, 546 bp, Zea mays
atggcccacgagaagaagctgtccaacccgatgcgggagatcaaggtgcagaagctcgtcctcaatatctccgtcggggagagcggcgaccgtctcacccgcgccgcaaaggtgctcgagcagctcagcggccagacccccgtcttctccaaggcgaggtacacggtgcggtcgttcggcatccggcgtaacgagaagatcgcctgctacgtcacggtgaggggcgagaaggccatgcagctgcttgagagcggcctcaaggtcaaggagtacgagctgctcaggaggaacttcagcgacaccgggtgctttggtttcggcatccaggagcacatcgaccttggtatcaagtacgatccttcaacaggcatctacggaatggacttctacgtcgtgctggagcgtgcgggctaccgtgtggcacgccgcaggaggtgcaagtcccgcgtcgggattcagcacagggtgaccaaggaggactccatgaagtggttccaggtcaagtacgaaggcgtcatcctcaacaaggctcaggccaacacgttg

SEQ ID NO: 5916 - DNA, 549 bp, Zea mays
atgttggcgcgccgacgggagcgcaggaggagctggcccgtggtcacctcagggcgtggaggaagaacccgttcgcccagatcagaagcaacaggtgcgtcgcctcccagtcccatgccgcgcccgccgcaggaggagggcggtgcaaggaacgcgagcacggccacaggcggtccttctccagcgtcatcgtccggtactcctcgtcgaacaagacgtccccagtccctgcgctgccgccgccgccgtcctcgagcgagtccgactgcgcggggccggcgctcaggaggagcagcagcgccagctccgaggtggagaaccccatccaggggttcatcgcctactgcaagaagtcccagcagcttgcctccgtcaggaagagcgccagcgacgccggcttccgcttcctgtcggccgcggcgtccaagatcgccgccgagtccgacggccttgatgacctcaccgagatttgcagaggatgataggaccatcaatcctgatcattgtacaatgatgcacatgcgttctggaggtttttttttgtttgtt

SEQ ID NO: 5917 - DNA, 357 bp, Zea mays
atggctagggtttttcgcgggtccctcctcctgatgtccccggcggcggcggcggcggcggcggcggcggcaggggccaagaaggcggcctccacgaagccgagggcgccggccgggatcacgaagccgatgccggtctccgaagcgttccgcaggttcgccggcggcgcgcgcgaggtcgcacgctccgaggccatcaagctcgtctggacccacatcaaggcccacggcctccagaacccgtccaacaaaaccgagatcaactgtgacgcgacgctcaagagcttgtttggtgggagggacaagatcgggatgatggaggtctcgaagctactgagccctcacttcctgaagaac

SEQ ID NO: 5918 - DNA, 933 bp, Zea mays
atgggctccggatctctgctcaaggtcttcgccaacaacttcgacgtccttgcagggcctttggtggcattggcttatcctttgtatgcttccattaaggcaatagagaccaaatctcctgtggatgatcaacaatggctcacatattgggtcctgtactcactaataacattgtttgaactcacatttgcatcaattattcagtggcttcctttctggccttcaatgaaattgatctttatttgctggcttgtcttgccatacttcaatggcgcagcctatgtgtaccagaattatgtgagacctgccttcataaagaaccagatggtcaacatttggtatgtccctcagaaaaaaggccttcttgggaaatctgatgacttcctcacagcacttgataagttcattgaagaaaatgggactgacgcgctgaagaaattgggaaacaaggctgccaacccatttaaacagtctggaaatcattttagggatcagaaagagccaaaatcttcaaaggatcccaaagaaccgaagccatcaaaagatgcaaagcaaccaaagccatcaaaagatacaaaggagccaaagccaccaaaggtttcaaagtcacccaaggactccaaagaacagaagaaggcaacgctgaaagatccgaagaaagcaccaaaggattctaaaggactgaagaaagcgcttaaggatccgaaagaacaggaatcattggaagacccaaaggaacatacagcaaagaaggccggcaagcgtgtgacgttcgccgaggtggagcctgagaaggagctcaaggcctcgaacagtgactggcacccatcctctgatttccacgcggcgtaccctgagcagaacccatgggctagcggcttcatgatctttgaggatgaaaacagctactggaaccgaggacccctagactgc

SEQ ID NO: 5919 - DNA, 531 bp, Zea mays
atgctacatttcatcaatatagcagttcgtatcttatcagcacctgctcttcatgtatcaggctgtaagggctcatgctcaaatatatggcagcggagttcctactggagcacacgacagtcccagagcaaggtttaccctctttttatacctaggaaaaatgtttgcacaggtggtgaagaaacttcattgacagaaagtggctcgagtaactttggggttgactctgtggattctgtcaagaaaccgtcttttgatcccaagagaagcaatagctttaacttttctggtgcatcttcccactccatggagaggcatcaatatttgcagagaggaatatcactattaaagacaagtgttacagccattactacctactattacaactcactgggcttggatgtgccatccaatctttctacttttgaggcgtttgctaagttgctccatatgttgtcgtcatcaaaaggcctttcgaaactgcctttgaattggacattgcttcaaggtcagaagaccaagcccagcagc

SEQ ID NO: 5920 - DNA, 318 bp, Zea mays
atgccggtgatcgagttccaccacgacgaggtgtgggagctgcccgccggcgccgaggtgctggcgcggtcggaccagacccgcgtcgagatgttccgcctgggggaccgcgccatgggcgtccagggccacccggagtacagcaaggacatcctcatgagcatcgccgaccgcctcctccggcataaccacatcctggactgccaggtggacgtggccaaggcgagcttcgacgtgcggcagccggacaaggagctgtggaagaaggtgtgcaggggcttcctcaaggggaggctgcagtcgcagcagcaattccac

SEQ ID NO: 5921 - DNA, 741 bp, Zea mays
atgtcgtcggcggtggaggccatctcctgccccaaggtcgacgtccccgccggcccggagccgggggagccggccaaggaagcggcgccgcccgcggagcactgcgacacggcgcccaacggcaagtgcgcgccgcgttgtcacggggaggaggaggaggaggaggaggacgaggaggacgaggagaaggcccccaaggccatcgacctcggtcccatggtcagcatcaaggagcagctcgagaaggacaaggacgacgagagcctgcggcgatggaaggagcagctcctcggcggcgtggacttgaactccgtgggagagacgctggagccggacgtgaagataatgagcctgtccatcctgtcgcccgggcggcccgacatcgtgctgccgctgccggtggagcccaacggcaagggcgtgtggttcaccctcaaggaaggctccccgtaccggctcaagttcaccttctccgtcagcaacaacatcgtctccggcctccgctacaccaacaccgtctggaagacggggctcaaagttgacagagccaaggagatgctcggcacgttcagcccccagctggagccctacacgtacgtgacgccggaggacaccaccccgtcgggaatgtttgcccgggggtcctactctgccaggaccaagttcctcgacgacgaccgcaagtgctacctggagatcaactacaccttcgacatccgccgggagtggccgtcgacgagc

SEQ ID NO: 5922 - DNA, 384 bp, Zea mays
atgcagtctaatcagcttgatggagccattccggcaacccttggtgagctaacacagctgagacggcttgatttgagcttcaacagcctgtttggttcaatcccatccaagattgctgaggttccattgcttgaggtctttgatgttcgcaacaacaccctttctgggagtgtccctgttggattgaggagactgaatgggggcttccagtatatgaataacaaagggctttgtggcgctgactacagtttgctaaagctttgcctttcttcacaggatgggctgaagcccagcaagcacagaccttttgaaccagacggggctgggaagacaagggggggggcctggtgggggaatgcccgacggtggtggagggctgagtgg

SEQ ID NO: 5923 - DNA, 123 bp, Zea mays
atgaggcggcgcagcgtgtggttgggcgtggcgtccatctcggcgggcgccagcgcgcggcgcgtgacggggcaggtggcgtggccgtcggtgaagagccagcgctcgatgctggcgcggtcg

SEQ ID NO: 5924 - DNA, 426 bp, Zea mays
atgatgcgccgcatcttgcgccagtggtcgccgtacaccgtgaacaccatgtcctgccccttgcccgtgaagatgtcgaacaccacgttgcgggtgcgggagccgaactccacgccctgcgtgtggagcacctccttggccagctccggggtcgacaccaccaccaggttgcgcacgcccatgcgcagcaggaagatgtcgccgaaccgcttcgccatggccatcaggttgcggtggttcaggtcgtcgcccacctgcagccagtttcccaccacgggggcgcccgggggccccggtgggaggcggtaccgcttgccggtcagcttggccacggcgatggccaccacagccgcggcgaacaggcccagcagggccttctctaggagggcgaggtccatgctgtgctgcctgccggtccggccgggg

SEQ ID NO: 5925 - DNA, 636 bp, Zea mays
atgaaagaagatgatctggaaagactgagccttcctttgatggttaccacaaaagaaaatgaggagaagctatgcactgctttcactgttacagtggatgcaaaagagggcacaactactggggtatctgccaaggacagggcaaaaacggtcatgactcttgcatctcctgactctaagcctgaggacctcaaccgccctggtcatattttccctttgaaatacagagaagggggtgttctgaaacgagctggacacaccgaggcatctgttgaccttgccatgttggctggattacctcctgttgctgtcctttgtgaaattgtggatgatgcagatggttctatggctcgcctaccaaagttgcgtgtctttgctgaaaaggagaacttaaagattatatctattgctgacttgattaggtataggaggaaaagagacaggctaattgaacgcgcttctgttgcacgcttgcctttgaaatggggcaatgtccatgcatattgctacaaatctgttattgatggcattgagcatattgccatggtgaaaggtgatattggtgacggccaagacattttggtgagggtgcactctgagtgcctcacaggcgacattttttggatccgcaagatg

SEQ ID NO: 5926 - DNA, 378 bp, Zea mays
atgatgggcttgcccgcgagcagctcggcaaggatgcagccggtgctccacaggtctacggcgacgccgtactcggttgcgccgagcaggagctccggcgggcggtaccagagcgtgacgacgcggctggtcatgggctgccgcttgccagggtcgaagaaggtggcgagcccgaagtcggcgatccggagcaggccgttgtcgtcgatgaggaggttggagcccttgatatcccggtgcaggacgctccgcgcgtggcagtggctcaggccctcgaggatctggcgcatgaggcacttgacctgcggctccgtgaagcgctggccggacagcgcggcgaggccggcgaggtcgtgctccatgtactcgaagacgagg

SEQ ID NO: 5927 - DNA, 933 bp, Oryza sativa
  misc_feature (816)..(816): y = cytosine or thymine
  misc_feature (819)..(819): s = guanine or cytosine
atggggcgcggcaagatcgagatcaagaggatcgagaacgcgacgaacaggcaggtgacattctcgaagaggcggggagggctactgaagaaggcgaacgagctcgccgtgctctgcgacgcccgcgtcggcgtcgtcatcttctccagcaccggcaagatgttcgagtactgcagccctacctgcagtttgagggaactcatcgagcattaccagaccgtcaccaacactcatttcgaggagatcaaccacgatcagcaaatatttgtggagatgactcggatgaggaacgagatggagaagctggacggtggcatcaggaggttcaccggcgacgacctctccaacctcacgctcgccgacatcaacgatctcgagcagcagctcgaattctccgtcaccaaagtccgtgcgagaaagcatcagctcctgaaccagcagctggacaaccttcgtcgcaaggagcacatcctggaagaccagaacagcttcctgtgccgcatgatcaacgagaaccatcatcaggcggcggtgggcggcggcgacgtgaaggcgatggtggatgatggcgccggtgctgtcgatgctgacggcggcgccggcgtactacggcgaggagtcgtcgagcaccgcgctgcagctcaccccgccgctgcacgccgtcgacgccgccgccgccgccgggttccggctgctatgccgacgcagcccaacctgcaggaccccggctgcagtcagcagcagcttccatgccgccgccgccggccacggcctgcagctgtggtaagaacacaaagacgcaagcaaagcatacayggsctacatcctgatactctcatcagagatctagatgattgcttgctaattaagcacatgatggcattgtcgattctgggagctaggagtaacttggagacgcatgaagatgcatga

SEQ ID NO: 5928 - DNA, 1191 bp, Oryza sativa
  misc_feature (220)..(220): n = any nucleotide
  misc_feature (224)..(224): n = any nucleotide
  misc_feature (547)..(547): n = any nucleotide
atggccgcacttgataccttcctctttacctcggagtctgtgaacgagggccaccctgacaagctctgcgaccaagtctcagatgctgtgcttgatgcctgcctcgccgaggaccctgacagcaaggtcgcttgtgagacctgcaccaagacaaacatggtcatggtctttggtgagatcaccaccaaggctaacgttgactatgagaagattgtcaggnaganatgccgtaacatcggttttgtgtcagctgatgtcggtctcgatgctgaccactgcaaggtgcttgtgaacatcgagcagcagtcccctgacattgcacagggtgtgcacggccacttcaccaagcgccctgaggagattggtgctggtgaccagggacacatgtttggatatgcaactgatgagacccctgagttgatgcccctcagccatgtccttgctaccaagcttggcgctcgtcttacggaggttcgcaagaatgggacctgcgcatggctcaggcctgacgggaagacccaagtgactgttgagtaccgcaatgagngcggtgccagggtccctgtccgtgtccacaccgtcctcatctctacccagcatgatgagacagtcaccaacgatgagattgctgctgacctgaaggagcatgtcatcaagcctgtcattcccgagcagtaccttgatgagaagacaatcttccatcttaacccatctggtcgcttcgtcattggcggacctcatggtgatgctggtctcactggccggaagatcatcattgacacttatggtggctggggagctcacggtggtggtgccttctctggcaaggacccaaccaaggttgaccgcagtggagcatacgtcgcaaggcaagctgccaagagcattgttgctagtggccttgctcgccgctgcattgtccaagtatcatacgccatcggtgtcccagagccactgtccgtattcgtcgacacatacggcactggcaggatccctgacaaggagatcctcaagattgtgaaggagaacttcgacttcaggcctggcatgatcatcatcaaccttgacctcaagaaaggcggcaacggacgctacctcaagacggcggcttacggtcacttcggaagggacgacccagacttcacctgggaggtggtgaagcccctcaagtgggagaagccttctgcctaa

SEQ ID NO: 5929 - DNA, 1680 bp, Oryza sativa
atgccggaagccaagctcagccagcaaatcgagcttgtcgaatcgaaggaaggaggggaggaagcaagcaaggcatcgaccgaccggaaacgaacctgcgcgcggttgtcggagctggcgagcgcggaggccatgcgcgtggccatccgccgcgtccgcgcgctggccgcctgctcatgtgaaggaattgggctggtctgctggttcggctcggcccatcaaccagtccaagtttcgatctccataaatctcgcatcgcaactacggctacctgcgctgcgcacaacacaagatcgtgacttcgtgagtcgtgaccgtcgtctccacacctatggacaacgcggcggcgccgccgtcatctggagcggcggggaaggagatggccacggcgggggcgctaccggacgacctgctcgacgagatcctcctccgcatgccggcgcgttccatcctccggtgccgcgccgtctgcaaggcttggcgctcgcgcacctcccatccctacttcctccgagcccacgccgcccgttccggataatcgccgccgccgtggttgacacaactgcaattcccgacggcgaattccgcaccaccatcagcatcagacctctcggcgacggcgacggcgaccgctcgggggcggccgtgtcgtcgtcgtcgtcgttcgcctcggtgcggttcggatcacggccttttgtcctcggctcctgggatggcgtcgtgtgcctggtgcccgccggtgtcgttcgccctctcagccgcatcgaccgatacgtgctcgtcaatccgctcaccaaggcctgcaccagcgtgccaccgccggcaacccgcggcatcgtcatctgcggttacgcccacccgaccacgtcgcgctaccacctcctccacgccgacgacgcctatccctacaaccatatggcggcggcgaccatccggattctgcgagtcggggagaagaacaacgtgtggcgcaagatcgcccgccaccctgcgcctgcgtgcgtggagtcgaggacctacattcgattcggcggcgctccacccgtcagcctccacggctgcctgcattggctggtcgccccgttgtcggcggcgtcggcacggcctctcctatcggtgttcgacatggaacgggaggagttccggcagatggacgcccccgaacaatgggctcgccatgggaacctgccgcacatgatgggtgtacagatcgctcggctctccggcaagctgtgcgcgttcgtcaacgagccgagcgccagcgcgttggggatgtggacgctcgaggactactccgacccgagcagctggcggatggagcggagtatcgactactcgcgccacggcgccggcagccggaacatcgcgcgcacgttccgcaaccggttctcggcggccaccaccgcggtggaggtgctacccgatggcgtcagcggcaacggcgatgtcggtggcggtggcgaggaggagatcatgttcctgttcaaccagttcgacacgagggaggctgtgtacaacgttgggcgcgcggcgtggcggtggcgaaggattttgccaccgccgacgaggcgcgtgatggcgcacaaggagtgcatgttgccgcgtgaggtgagcttcggtggggcggcgcattttgtggaggagagtgacatcggcggccaccgttgcatttgcatatga

SEQ ID NO: 5930 - DNA, 1107 bp, Oryza sativa
  misc_feature (1062)..(1062): n = any nucleotide
atggccaccgcgaagccagcctctccctcgccgccgccgagcaccgccgtcgtcccggccgccaataccgcagcagccgcggacaagccggcggtcgagcagctcctggaggtggcggaggacgaggtcgtcatcgacttcaagcccaacgccaagtgccgcgctgacctccgcctccgctcgctgcacccgtccctccccgtcgccttcaaggtccagacctcctcccctctcaagttcctcgtcagccccccgcgcggcgccgtgcagccgctctcgtcggcctccctccgcgtcgtgctccgcccgcagcagcacgctcccgccgccgctaccggcggcaccaccgccatccgcctccgcgtgttcttcggcgggccgtacctgctccgcctcgcggcggaagccggggacgccgcggccgtgcgcctcatcctgcgccggcagccgcacctcctgccgctcctggagcccgaggcggcggtgcccgacggcgccgagcagtgggcgccactgcacgcggtggccgcgaggggggacaccggggaggcggcggcggcgctggtggacatgggcgccgacgccgcggcgaccgacgcgcgcgggaggactccactggacgtcgcgcgcgagaagggctatcaagaagtggtggacgtcctggaacggtgggaactggtcatgacggcggcgaggcgaggcgacctccagagcctcgagtccctcctcagcaagcgcgccggcgtccggggacgtgaccagtacggcctgacggcgctccaccttgctgccatcaaagggcactgcgacgtgatcgcgctgctcgccgggtcaggctgcatggacatcgagtgcgaggacgtggaagggcaccgcccgctgcacctcgccgtcgaaggcggcagcgccgaggccgtcgagctgctgctcgacatgggcgccgaagtgcacgccgccaccaggcggggcgcgacgccgctccagatggccgtgacgatggggtacgaggccatcgcgctgctgctgcgaggccgtggcgccgacgaggcggccgcgccggcnttgtgcatcgcgtcctcgtcttcctcctcgatatcgtgtgcgtag

SEQ ID NO: 5931 - DNA, 1359 bp, Oryza sativa
  misc_feature (709)..(709): w = adenine or thymine
  misc_feature (743)..(743): m = adenine or cytosine
  misc_feature (760)..(760): s = guanine or cytosine
  misc_feature (822)..(822): r = adenine or guanine
  misc_feature (858)..(858): r = adenine or guanine
  misc_feature (882)..(882): y = cytosine or thymine
atggcgctcggtgttgacaatttaggtgttcaggatttgacttggatcgttgacaatgttcggttatgtctagcatctctgattttcttcatgctggcttgcgagctcgttgatatcaatgatttctgtggaaacaagaatgcattcaaggcactcattgctgccgagtactctggtgtcaaggttgagttggtgaagaactttcagatgggtgtctccaacaagacacctgagtttctcaagatgaatcctattgggaagattcctgttctagagactcctgatggtcctgtttttgagagcaatgcgattgcacgatatgttacccgctcgaaggctgacaacccactctatgggtcttcactgattgaatatgcccacatcgagcagtggaatgacttttcggccacagaggttgatgctaatattggaaaatggctctacccacggctaggaattgctccctatgttgctgtgagtgaggaagcagctattgctgctttgaagagatcattgggtgccctcaacacacaccttgcatcaaacacataccttgttggccattcggtgactcttgctgatattgtgatgacctgtaacctctacatgggctttgctcggatcatgaccaagagttttacttctgagttccctcatgttgagaggtacttctggaccatggttaatcagccaaactttaagaaagtcwtgggtgatgtgaagcaggcagagtctgtcccacmagttcaaaagaaggctscaccaccaaaggagcagaagccaaaggaagccaagaaagaggccccaaaagaagctccaaarcctaaggcagttgagaaaccagaggaggaagaggargcaccaaagccaaagccaaagaaycctcttgatttgctccctccaagcaagatgatccttgatgagtggaagaggttatactcaaacacaaaaacaaatttccgtgaggttgctatcaagggtttctgggatatgtatgacccagaaggttactccctgtggttttgtgactacaaatacaatgacgagaacactgtgtccttcgtgaccatgaacaaggttggtgggttcctgcagcgaatggacctgtgccgcaaatatgctttcgggaagatgcttgtgatcggctctgagccgccattcaaggtgaagggtctttggctcttccgtggccccgagatccccaagttcgtcatggatgaagtctatgacatggagctctatgagtggaccaaggttgacatctcagatgaggcccagaaggagcgcgtcagcgccatgattgaggacctggagccatttgagggcgagtcgttgctggatgcgaaatgcttcaagtga

SEQ ID NO: 5932 - DNA, 2034 bp, Oryza sativa
  misc_feature (1366)..(1366): n = any nucleotide
atggaggacgtcgtcaccgacgcgccgccgccgtcccgcttctccccggacgacctcgacaacttcgccgctccaccgccgcagcccacccctatcctcgagcctcgtgtccgccctcagcccgaggaggtgctggtgctcgacgcggtccggagccggggcctacaggggcaagctcgccgcggacgagcccgtggaggggaagctggagaccagggcggcgcgggggccgggaagcgtcggcgcggcccgcggcgtggcggcgctggccccgcccgggagcgtgccgacgaggcgacgatggacgccctcacccgcctccaccgcgccctcgccggcggcgacgacgacgaggagcagccggaggattctatccttggcgacaccgagggcatatgctccctatcccctgtccagcgggtctacggcttcgccgcgtgcttggttgcgggactggctctgatgatcctgattcttgtaagtaaaccacttaatcttgtgtttgccctgtgctttaattgtgcagatccattccaaggttctaacattgattgcaatcatatgcgagatctgtgctctgttctgaaaagagtgtttgctgcttgggcgtcaaagctgccagaacacagatcacccaaatatgcgactactgttgaagtcttcgagttacaacacctggctctactcgccagccactgtctggtggggtccgaccaggcccacttgtcacacacgtcgcccccatcgctgcatgggcaaagcgatctcccttctccggccaccgcgagagccacagccacgagagagcgagggcgagggcgagagggggaggatgatggagctgaggaagcgcccgaggccgcggcgcgtcgaccccgacttcgtctcgtcaccgccggcttcgctgctgctgccgccgccgaggaagcgggcgaggaggcaggccgcgccgccggcggctccggctccggctcctgctcctgcgcgcccatcaccagcggcgaaggaggcggccgacagccccgtcgctgggcttcagccatccgtgtgctgcccgtgcgaggcgccgctccgggcgtgcaggcttccgcgcgcctccttcctcgctcgccgtcgccctcccttcgactgtgtggtttcgatgtgcgcgtgtgtttctggaagttccgtggattggaggaagggaattggtacgaggcggacatgtggacggaggtggccaagtacctgttcggcgcggagctggtgcgcctctcctccacctgccgctggttccgccgcctcctcgccgacgagttcatctggcgccacgccttcctccgcgacctctccctcctccccgccgccgccgaccggtaccctcccngcccgctccaccgctcctggcgcctcctctacgccgccgccttcaacggcgcccactcgtactggttccgccggagcagcaggcacattggggcgtaccggattggtgggttcctgctcgagtcgccttacatgctcctgacggcgaagctggcggtgccgcagtggctgccgccgcaggaggacggcccgcagatcgccatcgagatgaccggcgcgtgcgtgctccccaacgcgcgccctggcatctggatcaccgacttccatcttgtgaggtgtcccaattgcaccctcaacaagtgcgcaggggtcctgcaggttctggacgcgcgacactgcgagctgttcctggagcagggattctggaatggcacctgggagtacgaggacctgggcgaccactacaacgacgaggagacccccaccgcagcctgcgccatcttcaacgccagcacccgcgctcatgagtccatttcatgttcgtccctggatcatttggcatttgtcaattccagttctctgttcatttacattcttggtgttctccactcgaagtcttgggtcaggagatgcgacgacccacagcccaaggcacattgccgcccatacgctgttgccctcaattccaacctcctgtccaactccaaccagggttataagacgttttga

SEQ ID NO: 5933 - DNA, 3915 bp, Oryza sativa
  misc_feature (3888)..(3888): n = any nucleotide
atgtcgcacagctccggcgcttccgacgcctcgtccacctctgacgaagagcctgtgccggcgccttccacctctgttcttcaaaccgtcaacatccgctcccacgtcccggtcgtcctcgatctcgacgtctccaactacagccagtggcgctgcagcttcgaatcggtcctcggcaagttcggccttgaggcccatgttcaggagccgcccgctctcgacctccgcactgccgagtggcgccgtgcggatcactgcgtggtcaattggctgcacaactccatcgccaagaacgtcttcgacgtcgtctacaagccccgcgcctctgccttcaccgtgtggagcgacatcgaaggcgtcttccgtgacaacgccgtccaacggtctgtctaccttgagaccgagttccgctcgatcaatcaaggtgacatgaccatcacgcagtacaccgccaagctgaagcaactcgccgacggcctccgcgacatcaacatgcccgtgtctgagcccagccaggtgctcaacctcctgcgcggcctcaacaccaagttccgctccctccgcgccagcatcgccgaccggaatccgccacacactttcatgaccgcgcgctcctacctgctgctggcggagctccagatgcagcacgacgccaaggctgaagccggggaggccctctacgccggcaccgggtcttcctccggcacctccgacaccaccggccagcctcgtcccaagggacggggcaagcgtcgtggccggggcggcggcgccccacctggcggcgctccttcgactcctggcggcggcgctggtgccgggcacgacggccagcctcgccctcctgcgccttggggctacaacccctggacaggctttgtccaggcctggcctttcccgttccgggctcccggcgcgggtgtgttgggccctcgcccgccgttccaggcccaacaggccatgaccgcgcagcacctgcttccggctcttcctccggcatctccaggagttcaatccaccggcgcctgggacaacagtgcgctctacagcgccttgcagtccgccggcgtcgccaccaccactcctccgagcgctgcggattggttcctcgacaccggtgcgtcagcacatatgtcctccacccctggtattcttgctcatccccgtcctcttcctttctcctcttgtatcactgtcggcaatggtgccaagctgcctgtcacgcatacagcttccacccacattcccacatcctccactgatctacaccttcataacgtgcttgtttctcctcccttgattaagaatttgatctctgtgaaaaagctaactcgtgataataatgtctccattgaatttgatccaactggtttctccatcaaggatcttcaaactcaggtggtgaagctccgctgtgacagcccgggtgacctgtaccccctgcgtctgccatcgccacacgccctctctgcgacttcctcgccgtcggtggagcattggcatctgcggctcgggcaccctggctctgcttccctgtccaagaatggcaaggcggaacgtatcctccggacgatcaatgactgcgtgcgcacaatgcttgttcacagcgctgctcctttgtctttttgggctgaagccttgcagacggcgacgcatctgatcaaccgacggccatgccgcgccacgggctccctcacgccgtaccagctgctgctcggcgctcccccgacgtacgatcatcttcgcgtgttcggctgcctctgctaccccaacaccatcgcgacagcgccgcacaagctcagcccgcgatccctggcgtgcgtcttcatcggctacccggctgaccatcgtggctatcgctgctacgacatggtctcccgccgggtgttcacgtcgcgccacgtcacgttcgtcgaggacgtgttccccttccgcgacgcgccatcgcctcgcccgtcagctcctccgccaccggaccacggcgatgacactattgtgctgctgcctgctccagcacagcacgtcgtcacacctgtcggcaccgccccagctcacgacgccgcatcgcctccgtcgcccgcgtcgtccacgcccagcagtgctgctccggcccacgacgtcgcgccgcctccatcacccgagacgtcgtcgccagcgtccgcctctccacctcgacacgccatgacgacgcgtgcgcgggctgggatcagcaaacccaacccgcggtacgccatgactgccacgtcgaccctgtcgccgacaccttcgtctgttcgcgcggcgctccgggatcccaactggcgcgcggcgatgcaggctgagttcgacgccctgctcgcgaacaggacgtggactctggttccccggcctcccggtgctcggatcatcaccggcaagtgggtcttcaagaccaagcttcatgctgacggctcactcgacaagtacaaggcacgttgggtggttcgcgggtttaaccagcgcccgggcgtcgactttggcgagacattctcgcccgtcgtcaaaccagcgaccattcgcaccgtgctgacgctgatttcctccaagcaatggccggcgcatcaactggacgtttcaaacgcgttcctgcacggccatcttcaggaacgtgtcctgtgccagcagcccacaggctttgaggatgctgctcgcccggcggacgtgtgcctcctctcccgttcgctgtacggtcttcgtcaagccccgcgcgcttggttcaagcgcttcgccgatcatgcaaccagcctcggcttcgtccagtcccgcgccgacccctccctgttcgtgctgcgccgtggctccgacacggcctacctcctcctctacgtcgacgacatgatcctctccgcgtcctcgtcgagcttgctgcagcgcatcatcgatcgccttcaagcggagttcaaggtcaaggacatggggcccctgaagtacttcctcggcatcgaagttcagcgcactgccgacgggttcgtcctcagccagtccaagtacgccaccgatgtcctcgaacgtgcaggcatggcgaactgcaaggccgtggccactccggcggacgctaaacccaagctgtcaagcgacgaggggcctctcttccaggactcctcctggtaccgcagcattgccggcgctctccagtacctgaccttgacgcggcccgacatcgcctacgccgtccagcaggtgtgcttgcacatgcatgctccgcgcgaagctcacgtcaccctgctgaagcggatcctgcgctacatcaagggaacggccgcgtttggcttacaccttcgcgcctcgacgtcgccgacgctcaccgccttcagcgacgcagattgggccggctgccccgacacccggcgttccacgtccggcttttgcatcttcctcggcgactccctcatctcctggtcgtccaagcggcagacgaccgtctcgaggtcaagtgcggaagccgagtacagaggtgtggcgaacgcggtggcggagtgcacttggttgcgccagctgctcggtgaactccactgccgcgttccacaggcgacgatcgcttactgtgacaacatctccagcgtctacatgtccaagaatccggtgcaccacaagcggaccaaacacatcgagctcgacatccacttcgtcagggagaaggtcgcgctcggtgaactccgcgtcctaccgataccgagtgcccatcagttcgcggatgtgttcacaaaagggcttccttcaagcatgttcaacgagttccgagccagtctctgcgtcggtgatacgacggctgcgactgcgggggggtgttggcgaacggcttcgtcagactctcgcggcgcgctccacgcgcacgacgcgcaccccgcgcacgacgccgcgctcctcgcnccgctcgcaccgctgcacgtcccttag

SEQ ID NO: 5934 - DNA, 1119 bp, Oryza sativa
  misc_feature (6)..(6): n = any nucleotide
  misc_feature (30)..(30): n = any nucleotide
  misc_feature (38)..(38): n = any nucleotide
  misc_feature (986)..(986): n = any nucleotide
  misc_feature (1049)..(1049): n = any nucleotide
atgggnttgagcccgggggcaaaccgagcntcgcggcntcgagctccaccctgcgtgcgacggcgccgagagagggaaagagagcttcaaccgagcatcgtggcgtcgagctccctgacagaggccggcggggagaagtgggagaggaggagagttgtcgatgaggaagtgaagccgatctcgccgccgccgaggaaggaagaggaggaggaggagccgatctcgccgccgcaaccactgaagcgggagatctggcaggagaaggcgagtgcgttctcgtcggtggtggtggtgctcggcgacgacaacggcgccaacgcccctcccttgctcctgcgtcgtcgccgccttgttcccccgccgccgccttgctctccttcccacctgttggctggcgacgctggcctgcccagaaccccagagagaagaggtgccatagaggaaggaggcggtggagacaccggcggtggcaagggcgacatcggcgaagagttcgcctccctcctcctcccatcctatcccacggaaggtgtgaaactctattcgcacatgtgtggcaaattttggggtggtggttttgcagtatttgcagcagttcatgcagctctgactctgcttgtcacaagctcagtaattgaagcagctatttcccagtgtgcacgcgttgtcaatgtggacttcattgttaattacacaatcccatatgatattccttctgctgcgttggtggaactagatgatgaaatacaagctaaggctgctatcgacttgatgaataatttccctttcataatcggtggaaagccaaggcctgtaagagctatctatgcaaagcatgaaatgtttctggatcggcctcctcgccctggaatcaagaaagagttccagtgggtgaaacaagaagatggaatagagtatgaaggaatgaacaaactgcggctccttgcaagaaggcaggaaacagaaaatatggcactcataaagantctattggaagaggacaaggacctagcaaagcagcaacaggagttacttgatggaatttacangaagagtaacttcttgcgctgcgcggagatgattcgctgctgtcggatgctgtctattatgcatgtctga

SEQ ID NO: 5935 - DNA, 1080 bp, Oryza sativa
atggccggggacggcaaggtcgaggtacacgacggctggtccgcaccgccggtcgccaccatcgcctcatcccagatggtgttcaccacaattgaatcgacggagcacgcggcgtctgccgaggcggggagagctggagcgacggcaacagtgggcgcggaccagagctgtagcgcgccgccgcctttcgaggctatcgccgggggtggagaagggaaaggggagaggcggcaccgccgagatctcgcccgccctctatcgccgagctcggatgcgtcctccacaccgtcgagctactcctctatctccgccaccgcctgccgaagcgtcgccgccgtccgagaagggagaggggagaggcagcgcagcgaaagggattcgctttggctacgtacattggtgtacgatggcgtcgtctcgctccgtcgtgctccgggtgctggtcgcggtggccgtcgtggcagcagccggggcgccgcgcctcgccgtcgcggactcgccgccgcttcaggacatctgcgtggccgacctgcgggcggcgacagcggtcgacgggttcccgtgcaagccgacggcgtccgtggtgagcgacgacttcttctgcgacgccatcgtccaggcgcccagcacgagcaacccgttcggcgtcaactcacgcgcgccacggtgtccgcgttccccggcctgaacacgctgggcctctccatcacgcgcaccgacctcgcgcccggcggcctcaacccgccgcactcgcacccgcgcgcctcggagctcgtgctcgtgctcagcggcgaggtcatggtggggttcaccacggcggccaaccggctcttctccaaggtggtcagggagaaggagctcttcgtcgtgccccgcggcctgcagcacttccagctcaacgtcggcgccggcaacgcgtcgttcgtcgccatgttcgacagccagtcgcccggcctcgtcacgccgaccttcgcgctcttcgcgacccagccggccatgccgatggaggtgctcgccaagacgtttctcatgggcgaggatgaagtgggcgccatcaaatctaagtttgccggcttctga

SEQ ID NO: 5936 - DNA, 942 bp, Oryza sativa
atgggagctggtggctgtgtgcaggacgaagctgaagcagacggagatggagtgcgagtacctgaagcgctgcttcgggtcgctgacggaggagaaccgccggctgcagcgggaggtggaggagctgcgggcgatgcgggtggccccgcccacggtgctctcgccgcacaccaggcagccgctcccggcgtccgcgctcaccatgtgcccccgctgcgagcgcatcaccgccgccaccggcccgcctgccgagacgacgcagcggtagagggccccgtgttggcgttgttgcgttgggtccagtcgtctcagaggagtcagaggcgtggacaaaatgtttgttgcattgtttgtgttccattggtcgttgatcttagcttgatgatctgtgattcgcgccttgctcgtctagcacggtggccaacggtgcgtagttcgtcgtcgttttctttcctcgggagaacaactgccaattctgttggcaaatccgcaaagcgtgatccaagcgagaccatcgttcatgcatgcatggtccatggctccatacaattatcgatcctctgtccacacaacaccttcaccgcgaacccgtgggcctctttgcaatggaccaaggtttggttggtcacaaggtactggcctatatatgtggaccttagtaagggctcaggctattcgtccgtgtattacgctgtcttgggccaagggattaacgatctgtgcctaacaaatgtcttgatgtatgagcggaacacacaagacgacgtagttacgtattatgaccggagacccaccatttctgtccttctcatacgtacctggagaatccatctggtcaagaatatggccccgaatatggtgccgcctgatggcgacgaaccacaagatgtgggctcctcctctagcttcgacggtacgagatttggtggtggcccgacctag

SEQ ID NO: 5937 - DNA, 1491 bp, Oryza sativa
atggagccatggagagcactgcatctgggtcaatcaacaattatgaacgtttctcccttccattcgctctgccctcatctgaagaggaccacagcacctaacgaccgagatgatgaactgtggactggagagcaccacacacccctcccggatttcctggcgaggaggagccagatcccggcacagtgctgggcaggcagtgccccccccacaccatatgcccggctcctgggcgatgatgcagcaactaccggggtcgccatcgcccaaccgaacgtctcgcccggtgccctcccgcccccggccgagatatgcagccaccaaccgtacggtgtgcgccccggaaaagtgaccacatcttgccatgatgggcatgagcttgggaaggaaattccttttgtcagtgtaatccagtgcataatacaccagcactgtccaccatatgcagatggtttcaactcgggttggggccacatgtacattattgttggtagtgctgtactgttcagtgtacatgaccatcctcgcaagtactctgcaatttgccaagatctgaagatctggagttctggacctcatgttcggtacactgctagatccaaccccaacatgaaagagattttcactgcacaagaccataaaccgactgacacgtgggccccaccacaccctggtcccactactcccacacctcgcccgcgccgacttctcgcctctctgacttaccgcatactttactccaccaccaccacccctccccctttgccaccgcgcccacccttcaaagccacccccaaccctcaccgacaggtggggcccaactcctcgtgggtcccgcccgccattgtcaccgtagcggctcacgcagaggcgacgacgacgcgcacgcgcaccgccctcctccctccccgcgatctcgccgtaggggatctcgtcggcggcgaggaagcaaaggccgagggggcagcggctggggaggggaggggaggggagagcggcattgggatcggatcgaagcttctggaaggttccgggcgcggatccggctcggtgggttgctcgctcgtggctggaggtagcggcgcgctggtggtatcggcttttggtctaatgctttgcttcggtttggagtttggagcggggggagcaactctgaggtttggttttcctgagatggaggacctgctgggcgcggaggtcggcaagaacgactatgactggcttgatcttggagtgacatgtttttgtttgtttcgtaaaagaggatatgctgcattgcccccagaaacgtcactcttccggcttcttactccccctgggacaccccgttgtcctgtactggaggttgctgagaaaacaccatccccaaatatattacctaagcgcactgccactagatcatcgtcaaccaccagagcgtcgaggaccacccaaaccagggagtctggtgataacacgtttcttgcttctctacctactcgaactacctag

SEQ ID NO: 5938 - DNA, 261 bp, Oryza sativa
  misc_feature (12)..(12): s = guanine or cytosine
  misc_feature (15)..(15): s = guanine or cytosine
atggcgacgtcsgcsgggttcctggcgcggcgggcggcgcaaaaggagagggtgcggctgctctaccgccgcgccctcaaggacaccctcaactgggccgtccaccgccacctcttctaccaggacgcgtcggatctcagggagaagttcgaggcgaacagagatgtggacaacccggatgtgatcgataggcttatcgatgatgcggaagcgcagtacaggaatttccagcatcccgatccctacattggtaagctctga

SEQ ID NO: 5939 - DNA, 180 bp, Oryza sativa
atgacaggtttggttgagtccaagcagagccaatctgcaagccaagggcgcaggagcgtccacgtgaggtcaagacaaaagatgatgttaaattgtatcgccatatgcttggagaaggttgagagggagaggatgacggcgaggccacaaacgaacagatgggaggaaggtgatagctag

SEQ ID NO: 5940 - DNA, 663 bp, Oryza sativa
atgacgcgccacgccggcgcccgccgccggggcggcccgggcttcgtcagcctcatcgtcgtcgtcgtcgcgtccctgcccgaggagtgcgccgcctacgtgcgggagtatctcaccggcgtggcctaccgctccgacctcgaggtcgtcgcgcgggaggcctccgcgtacgcgcggaccgcccgcgtcggggacgacggccgcgacgcgtgggtgttcgacgtcgacgagacgctcctctccaacctcccctactacgccgaccacggatacgggctcgaattgttcgaccaccgggaattcgacaagtgggtggagaggggggaggcgccggcgatcccctccagcttgaagctgtacaatgaggttcgcgaccttggattcaagaccttcttgctcacgggccgcagcgaggggcaccacggcgtcaccgtcgacaatctcaagaagcagggcttccatgattgggacaagctcatactaagggcgccagctgatcgcaagaagacggcgacgatatacaaatcggagaagaggaaggaaatggaagaggaggggtacaggatcctaggcaactccggcgatcaatggagcgacctgctgggtttctccacgagcgctcgctccttcaagcttcccaatccaatgtactatattccatga

SEQ ID NO: 5941 - DNA, 2778 bp, Oryza sativa
atgggttccagaggcagacgccaatcactatcgcctactccatctagaagagcaagttcatctcatagtattgaacgagatcgtttaagctcgtatagcaaagcttctgcaacatcttctggtgaagatgatctggattccatgcagtctctaccagttgcctattccaccagcccagctgtaaaaaagagcttgtctatgatgaagaccagaactattgcttcatcaaagaagccgtccacaactttttccactagttctgtcccaaagcggtcatttgattctgcagtttggttgatggatcatcgcaaagctcccaataatatgttccggccactgctatcaagtgtccctactacgacatttaatgctggcaaaggaaatgttgtgcagcggcctatgttttctcataattcttatatgacaactagcagcaatgcaagctctgagcatagtgccagtttcggcccatatgtggataacgaccaagagcagcatgatcagattagtgaatgggatgataaccatcaagttcatggtgatatatttatgtttgataaattggatgaattgaatgaagaaaccagtcatgaggagactacaaaatttgtggaaagtgatagacaggacattgacatggaaaagggttgggcagctagtcagacttctggtacaaacagttctcatgttggatatggtgaaatggctacttgcaccaggtgcgggaacgttttcaaggttatggatgtggatagacaaggtgactattgtgaagaatgtggtttattgcttagcatatgttctgcaggccctgtgacacaaactttacaagaagcacaccaacaggacgaaataactgcaaattgtaaatcatatgctgaatctggaacttctatagcctcggattgtgtagagtatagggaagaagcatctcttggtcatcaatttaatgatgaacctccagctgattgtataaaagcatgttccccacttcagtcaatggtggacacaaatgaggaaatgctgctggctcatgaggtaagtgataaccaacaagcatctgcagaacacgagcatttcagggaccaaattaacagccacagtgaaagcttgccacaatgccttcctgagctaaaccgccagcataatgattccatctctcaaactgcctctggtgataattatcaactgggatcaacagcatattcaagtcctaaggtagaaaacactgatgccactgggatatcggtactcttactccagaagtcaagtagcaataaatggcctgttgtggaaggaaggactctgtctgcaacaaatattctttgttcagaaccctattatacaagggatagtatcagtgctatgaggcgtagctttggacgggatagctcttcagcaacttcttccattgatctagggtcatcaaggcaatcagatgtacgttttgagcgtctcaggagtggcaagaggggtgatttcgagaaggctcgaatgagcagtaccatgagccatcaaagtgttgcttcagtgtcagatatgtcaattagtggttcatcagcttcactttgccctcagagtgatgttattggtgacacttgtttcccaattgacacgctggaaaggagtgcatcgagaacaacagtctctattgaagaacatgacagctcttgtatggatgctttatcaagtggtatggagtgttcatctgctgtgcagccgataatcaatgatgaaatccttgttgacttgaacacctcaggttttcataggttaagtgaaacagaagatatacttattaagaaccataatatggaaatggtggctgacaatgatcatttgagcactaacttgtgtttatcagatattgaaatgccaagtgatgccctagaatcttcagctgctgaggaaagttatataccaaaaactgaggaagatacttccaccaaagcacactgctatacaatcagcaccctagagcatccaagcgatgagaacaactttgatgatcttcaaatgcagtctgaagcagttcagtcttcaaatgaggaaaataaatccaatggctgttgcacgcttgctgtctctgaggatgacgtgttggtttctggaacagatactaacataaaggaacttcctaatgatgatgtttccatgcttggtgtagtgactagtgccttcaataacatattaaaaccacctgaagatagtacagatgcacctgctactgcagcttgtaaactcagcataccatcaccagattacagctgttgcacctcatttccatgtctgacaaaatcacccgaggcagttgaaggatcgaggaaagaaattcagagatgcttcactttggaagaagctaccgatacaattctcctctgcagttctattgttcatgaccttgcatacaaggcagcgacaattgcactggaccatgagcaggaacgagtacacgcagagcctactcgcccatctgttaccatcgttggaaagtctattccaaaggaggatggtttacttaagctgactcacagacgaacgcctaaccgtaaggttaaaaggaaaagattggaaggtgaaacaaccataaccgaaaatgctgaaaagaaagatgatatctctacagaccactcacccgtgcgttcctcttctggaattacaaggacatctgagagcatgaagcctccaaaactggaatccaaaccaggatctataggtgttcttgcatgcatctgtcatcatcagcactgcttcaatcacttgtatgacaacctatag

SEQ ID NO: 5942 - DNA, 1364 bp, Oryza sativa
atggcgcaggcggtggtgccggcgatgcagtgccaggtcggggccgtgcgggcgaggccggcggcggctgcggcggcggcgggggggagggtgtggggagtcaggaggaccgggcgcggcacgtcggggttcagggtgatggccgtgagcacggagaccaccggggtggtgacgcggatggagcagctgctcaacatggacaccacccctttcaccgacaagatcatcgccgagtacatctggtggttggaggaactggaattgacctcagaagcaaatcaagggtcaatatcaaaaccagtggaggacccctcggagctaccaaaatggaactacgatggatcaagcacagggcaagctccaggagaagatagtgaagtcatcttatagccacaggctatattcaaggacccatttcgaggtggcaacaacatattggtacgttatgtgtgatacctacacaccagctggggaacccatccctactaacaaacgtaacagggctgcacaagtattcagtgatccaaaggttgtcagccaagtgccatggggtttggaatagaacaggagtacactttgctccagagagacgtaaactggcctcttggctggcccgttggaggctaccctggggccccagggattatactgaacaagaatggagctttgttgatcagataataataaagaagggtccatactactgcgctgtaggatcggacaaatcgtttggccgtgacatatcagatgctcactacaaggcatgtctttatgctggaattaacattagtggaacaaatggagaggtcatgcctggtcaggagtgggagtaccaggttggacctagtgtcggtattgaagctggagaccacatatggatttcaagatatattcttgaggagagaataacggagcaggctggtgtagtgcttacccttgaccccaaaccaattcaggagggagactggaatggagctgggtgccacacaaactacaggagcaccaagagtatgcgtgaagatggaggatttgaggtgatcaagaaggcaatcctaaacctatcacttcgccatgacttgcatataagtgcatatggtgaaggaaatgaaaggaggttgacaggtttacacgagacagctagcattgacaatttctcatgggtgtgtggcaaaccgtggatgctctattcgggtggggcgagacaccgaggcgaagggaaaaggggctacttggaagaccgtcgcccggcatcaaacatggacccgtacgtcgtgacagcgctattggctgaaaccacaattctttgggagccaaccctcgaagcggaggttcttgctgctaagaagttggccctgaaggtatga

SEQ ID NO: 5943 - DNA, 450 bp, Oryza sativa
atggcggaccagctcaccgacgaccagatcgccgagttcaaggaggccttcagcctcttcgacaaggacggcgatggttgcatcacaaccaaggagctgggaaccgtgatgcgttcgctggggcagaacccaacggaggccgagctccaggacatgatcaacgaggtcgacgcggacggcaacggcaccatcgacttcccggagttcctcaacctgatggcacgcaagatgaaggacaccgactcggaggaggagctcaaggaggcgttcagggtgttcgacaaagaccagaacggcttcatctccgccgccgagctccgccacgtcatgaccaacctcggcgagaagctgaccgacgaggaggtcgacgagatgatccgcgaagccgacgtcgacggtgacggccagatcaactacgaggagttcgtcaaggtcatgatggccaagtga

SEQ ID NO: 5944 - DNA, 240 bp, Oryza sativa
atgaagcgccctcacgcaccggcaccgagcaggtcgcacgctcgtcccgctgccgtccacattgataacgcatccgtccagtccaacgactgctaccgccggggccgggaccgaaggggcatctggccgggtgcagcggccgacaagtgtaccgcgcaagtgcttttcgcacgggagaacgcacgggatttgggtggtaactgctggatcgggccaatccgcggtcggatttagaataaa

SEQ ID NO: 5945 - DNA, 1236 bp, Oryza sativa
atggagggggaggaggggaggaaggggaaggaggcactgagcggggggcacctctgccacgtgtgcgggtaccagtaccccaacgcgaaccctagcgcgaagctccgccgctcccaccggaagaactgcgggaaggcgccggccgcggacgagcgggaggagggggaggaggtggacgccgacatggagcgcaatgcgggggaggggctcctgccagttagagcaggaggaggtgagtcggaggggaatgcaggctctccatcgctcggatctgcgagaggagatgctgatttggtggaggtgaaggagattgcagagtttagcacaatgcctacttctcaggatatcaatgctctcaagaatgatggtaacgagaagacgccacttgaagacataagcaccaaggatatgactgcatcacttagtgaagataatgttgaagaaaagaaagagaccgaaggcactagtgtgaaggagatgaattcaatactgaaagcagacaatgttgaagaagagaagttgactgatgacacgagtgcagagaggaatgcaatgcagcacatagatgacgctgaaaagaagcaggctgctgacactgtttcgagggaaacgagtgctctacaaaacatagaagaaagggaaaacgttgaaggtactggtgctaagggagtgccagcagtagggagcttggaaaatgctgatgcggagaatcagactgaagacaccagtgcaaagacagaatgtaaatcagataatgctgacaacaagaagcagagttacgacacaagcacagaggagatgaatgccaagaatcaagctcaagatacttcctcaaaggagatgaacaccatacaaaacacatctaatgctgaagaaaagaaccaaactgaagacccagctgtccaggagggaaacaagcagaaggaaggcatctctcccacagtagcgaagcagagttcagaaagagttcatgtccctctcaaggtgctcctagccgaggcgagtgtggagacgaaagaaaagaaaaccactgccaaggagcgtgttttgtcattcaggcgccgagtatcgaaggacgactcatcgtcggccaagtccgggtccccaaaacctggtgctgatgacaacaaattctggagctccccagcaagattgcccgagaacaatgctgagaagaaatccaaagcaaggaagcagccatggatgccgttcatttgctgtcactcggtgcactaa

SEQ ID NO: 5946 - DNA, 3204 bp, Oryza sativa
  misc_feature (2224)..(2224): m = adenine or cytosine
atgggagcttactatggatcatgggaggcttttcttgaggatgtccaggaagtaatacgcaacctgcacactgcatttggtgatcgccctgatgtgcttgaaatggttgttgcattgtctcagagttttgagtcattgtacaagacagaggtgcttgaccttgttgagaaatttgacaaatacctctcggacaagaatgctggttcagaaatgcacgaggagctacatgatattctaactgcagcgaacagcttacctaaagctccatgggaagatggcgtttgcaaagtatgtggtattgatagggacgatgatagtgttctgctatgtgacaaatgtgactcagaataccacacttactgcttgaatcccccactagcccgtataccagaagggaactggtactgtccatcatgtatgttaggtcaaacgaaagcacatcatgatcagggtgttcaagatgtgaaacggcagcaaaagaaatttgttggggaggaagcccatgcctttcaagaggaacttaataaattagctacagcaatggaagagaaggaatattgggaccttaacatgcaagagaggatatatttactgaaatttctatgcgacgaaatgctcaacactgctctaattagagaacatctagatcaatgttcagataagttaggcgatcttcagcagaagttccgtgcttcaaattttgaattgaaagatttgaaatataaggaggagatgaggacttcatatgctagacaaagtagatctagtaaaactgaacagcattttaacaacagttctggacccgtggaaaatcaacagcagtgcacgcccacagcattggaccatctggaagaggctgaacagggtaatgttggagttaacctaaacaacccagctgatggggttcctgatgggcaattgaatgtaggcaagccttacaaaagtgacaaagacatatccagtgcatctatggttgaagaacgcaaatcttcaggactttctgaacaaccatcaggaatggctattgaccagattgatggggatgctattgatgaagggtcccagagttgtgagaagaggtcattaggtgccaagagcagtacatgtgataacttgaacttgaaagacactgaatttagcacacctggaagagagttgcctgatgaaagagccagcacatcattccaagataatcttgaagcatcatcaactaaatcaattgagcttgatgctgataataatgaaatggatactttatcggatgacatttcaaaattgcaggattcaattagcttactagagtcacagattaatatggcatcatcgagaagagagtgtctgggtaaggattccattggtcgattatactgggttataggaagaccgggtaaacgtccttggttggtggctgatggaagcatgctgaaacccaaggagagagatatcagtatggttaacagttatcccccatctgcttttgattgcaaaggttggaattcagcatctattttcatttatgaatctgatgaggaaatccagtgccttcttgactggttaagagactatgacccaagggagaaggaactgaaagactctatcttgcagtggcaaagacatttctgtcatcaaagcagttctcctctcgttgatcctccaatttctggtccaaagggtgaacagcttatggagcttccaaataccaaggctgcagtaattttggaacaaaagtatggtctgcaattggaccaggacacaagtgatctaccgaaaaagcgaggaaagaagataaagttaagttctgaagatagaacatatcgctgcgactgtttggaacctgtatggccttctcgataccattgtttaacatgtcatgagacttatctcatatctacagagtttgaggggcataatgatggaaaatgcagtaaaatccaccagtctcctgatgaaagcagagaaaatgatgagccaaaagtgaaggttaccaaatctgatacgaaggaaaaagattcccttgaatgtagctctgtcattgaaccgtccagtgacagaaaattgatgcaatgcccatatgactttgaagaaatttgcagaaagttcgtcacaaatgattcgaacaaggagacagtaaagcagattggacttaatgggtccaatggagttccatcatttgtgccttcacctgcattttttcttgaacctgcaattgtacaaagtcaaaacmgaaaagatgatgaactcaaggattggacctcctctttagaggaatgcaatgcaatgtctgctcaaaagctagttcaagaggtttccaaatctggtcaaagttgtcctggcaatgtgggtgatgagaaggtgcaaaaatctaaaaagcccacccctgataatacttctggtgaggaagcacattctacaacaggcaagccaacacgattgctagctgttaatggggggttggttccagagtcatccttgaggcctcttataggacgaaactctcacatacttaagcagcaaaagataaacttgcttgacatcgaagcagccttgcctgaggaggcactgagagcctcaaagtgtcagcaaataagaaggcgttcatggcgtgcatttgtcaaagatgcagaatcaatatcccagggcatgataaaagctgagttcttgaagaacgattggtggtactggtcttccttcacagcagctatgaagacatcaactgtatcctcactcgcgctcagggtctacactctagatgattgtatcatctacagtaaggatcaagttccaagcgttgagccagctgacaatacaagatcgatgatagatgatacaaagtcttctgttatgtcgtcgcttaaggagggtagcgtggtagacatcgttccgaaggaagaattggtactccatgtgcgagcattcgatcttgatgccaccatgagtacccggtgcaattttctctgttggactaaccctattcattgtagaggttattccataggagatagaggagacatgtcaggtagggaggatatgtctcattttctacccactttcactctattagccgcagtgggtagtgtagcgggtgttagtttctcattctcatggtctgtacttatgtcgtgtttagggggggcgctctggggcgttgtattgatcatttgtttgatgtttctggcaagtttgcaacatctgataggaatgtag

SEQ ID NO: 5947 - DNA, 1758 bp, Oryza sativa
atggcgacggcgacgcaagctcccacctcgcccgccgccgcgtccgggcgtggctccgttctccccctcctccgtggccgcccctccacccgcgtccgcctcgccgttggccggcgaccgcagaccgccctccgcgcgcagccgccgggggcggcggaggtggtggagcagtcggtgaacaccatccggttcctcgccgtggactccgtggagaaggccaagtccggccacccgggactccccatggggtgcgcgccgctgggccacgtcctattcgacgagttcctccggttcaaccccaagaacccctactggttcgaccgcgaccgcttcatcctctccgccggccatggatgcatgctccagtacgcactgcttcacctcgccggatacgacagcgtcacgactgctggtcctctggggcagggttttgcaaatgctgttggcctagcgcttgctgagaaacatctagctgcccgtttcaataagcctgatttgaaaatcgtggatcatcacacgtatgttatacttggggatggctgccaaatggaaggtgtgtcaaatgaggcatcctcccttgctggtcactggggtctcgggaaactaattgccttctacgatgacaatcatatatcaattgatggtagcacaggcattgctttcactgaagatgcacttgcccgatatgaggcactaggttggcatactatctgggtgaaaaatggtaacacagggtatgatgacatccgtgctgcaattaaggaagcaaaggcagtcaaagacaagccaactcttatcaagaaatatactcctgaaaatcctgctgatgctacaaggaacttatctcaacaatgcttgaatgctcttgctaaagcaatacctggatttcttggaggtagtgccgatctcgcaacatcaaatatgacattactaaaaatgtttggtgattttcaaaaagacacacctgaagaaagaaacatccgttttggtgtgagagagcatgcaatgggtgccatttccaacggcattgcattgcacagtcctggactaataccttactgtgcaacattctttgtgtttactgactatatgagagctgccattcgtctttcggccttatgtggatcaagggtgatctttgtaatgactcatgattcaattggccttggagaagatgggccaacacatcagcctgttgaacagttattcagcctccgcgccatgccaaacatactaatgcttcgacctgcagatggaaacgagacttctggagcttacaagattgcagttcttaataggcaaaggccctctgtccttgccctttctaggcagaagcttcaacagctgaaaggaacatcagcggaaggcgttgccaagggaggatacattatttctgataattcatcaggaaacaaaccagatatcattctcatcggcactggttctgaacttgagattgtagaaaaagccgcagatgagctgaggaaagatgggaagactgtacgagtagtttcactggtttgctgggaattgtttgaggagcagtcggagaaatacaaggagagtgtttttccaagtgaagtaacttctaggatcagcgtcgaggctggggtcacatttggatgggagaaatatatcggagaaaaaggtaaagctattggtgttgaccgttttggttctagtgcgcctgctgggaaaatatacaaggagcttggtttgacagtggaaaatgtcattgcaacggccaagtcactgtga

SEQ ID NO: 5948 - DNA, 2694 bp, Oryza sativa
atggcgtcggagaccgagacgttcgccttccaggccgagatcaaccagctgctgtccctcatcatcaacaccttctactccaacaaggagatcttcctccgcgagctcatctccaaatcctccgatgcattggataagattaggttcgagagcctcacggacaagagcaagctcgatgcgcagccggagctgttcatccacattgtccccgacaaggctagcaacaccctgtcgatcatcgacagtggtgtcggcatgaccaagtcggacctcgtcaacaacctcggtaccatcgccaggtcggggaccaaggagttcatggaggcgctcgctgctggtgctgatgtgtccatgattgggcagtttggtgtcgggttctactccgcctaccttgttgctgagagggttgttgtgaccaccaagcacaacgacgacgagcagtatgtgtgggagtcacaggccggtgggtccttcactgttacacgtgatacctctggtgagcagcttggacggggtactaagatcaccctctacctcaaggatgatcagctggaataccttgaggagcgtcgcctcaaggatctggtgaagaagcattctgagttcatcagctaccctatctccctatggactgagaagacaactgagaaggagatttctgatgatgaagacgaggaagagaagaaggatgctgaggagggaaaggttgaggatgttgatgaggagaaggaagagaaagagaagaaaaagaagaagatcaaggaagtctctcacgagtggaacgtgatgaacaagcagaaacccatttggttgaggaagccagaggagatcaccaaggaagagtacgctgctttctacaagagcttgacaaacgactgggaggaacatctggctgtcaagcacttctctgtggagggtcagcttgaattcaaggccatcctgtttgtaccaaagagagcgccatttgacctctttgacaccaggaagaagcaaaacaacatcaagctgtacgtacgccgggtgtttatcatggacaactgtgaggagttgatcccagagtggctcagctttgtcaagggcattgttgattctgaagaccttcccctcaacatctcacgtgagatgctccagcagaacaagatcctgaaggtgatccgcaagaaccttgtgaagaagtgcgtggagctcttctttgagatcgctgagaacaaggaagactacaacaagttctacgaggctttctccaagaatctcaagcttggcatccatgaggattccaccaacaggaccaagattgctgagctcctgaggtatcactccaccaagagtggtgatgagttgaccagcctcaaggactacgtaacccggatgaaggagggccagagtgagatctattacatcactggtgagagcaagaaggctgttgagaactcccccttcctcgagaagctgaagaagaagggttatgaggtcctgtacatggttgatgccattgatgagtacgctgttggtcagcttaaggagtttgaaggcaagaagctcgtctctgccaccaaggaaggtctgaagcttgatgagagtgaggacgagaagaagcggcaggaggaactcaaggagaagttcgagggtctgtgcaaggtgatcaaggaggtgctcggtgacaaggtggagaaggttgttgtctctgaccgtgtggtggactctccctgctgtctagtcactggggagtatggctggactgctaacatggagaggatcatgaaggcccaggctctgagggactccagcatggccggctacatgtctagcaagaagaccatggagatcaacccggagaatgccatcatggacgagctccgcaagcgtgccgatgcggacaagaatgacaagtccgtgaaggacctggtgatgctgctcttcgagactgccctgctgacctccggtttcagcttggaggaccccaacaccttcggcaccaggatccaccgcatgctcaagctcggcctgagcatcgacgaggacgagtccgccgaggctgacgccgacatgccgccgctggaggacgacgccggcgagagcaagatggaggagagatggagcacatatgcgtttttgcgttgtgaggacatcgtgaggtacgtgtcggctgatctgctggctgagctcacgtgcatctgtatcggatcggaggcagaggttagagctctatccacacacataaaactagtcttggattctactagtagtaggccaaaagcaacatccattataaacagtgttggatactaccaggtcaagtacacattcagagaaacaaggctgcactcttgctgcagatcaagcggaggacttgcaatggaggcaaccaaggagacccagcagcagcagcagcagaggaagccggacgccggcgacacggtgcagctgccgatggacaccagcccgtacgtgcagtacaagaaggacgacggcctggaggactacaagctgcgcgcctacggcgcccgcggccacctccccgtctccgacgtcccccacggcggctgcggcaccgacgcccccaccatccccggcaccgccgtccccgtcgccacacagcgccgccaccaacaaggcgacaccgccgctgccgccgccggcaccggccgcgttgacaccgccaccgacgccatcaatcaccatggcgtgccatag

SEQ ID NO: 5949 - DNA, 963 bp, Oryza sativa
atggggatcgtcggtgctaggatatacgcgagactgaggcccccgaattgtcaagtaataaccctacatcctgttggccgaagccgggtagccttccacctcgaatccgtgcccggcgagatcagagatagcgctttcgtctctcctgacagtatccggagacaccgtagggtactagccgtgcttatccctgaagtcgatatccggcggcgtgtcttggcatatgtaggcttctatgttgtggcttctatgtcgattgtgttgggtgttgatcctccccctctcctcctaggggagcttaactctggttgtctttccttatccggaactcctcctatatccgcaggttatttccgtataggacatggtatgtgcaacggcaagaatggcggtagtagggcttcctcccttccccggtgccctaggactagcatggtgaggatagggagtggatctagcgtgcgtgagaaggtcaaccgcctaggcgaggggatagttggatctagttttcctaggccaaatatggtcaaggaaaccagatctggcaatgttgaccatctctatgcgtcaggtggcgtcgacacaaggtggctgcggaggagtggaactggagtagggtggagtcggcatggacacatggttggcaggtggggcacggtcatagacatagctggcagagagctggagaggcaacatgaagaggttgcatggagagataagaggggcgcttggagaagacaccgtagaagggtgactcggatgcgcacgattgctggtgcttcttgttgggcgaaaggccaagtagtggctcaagcaatgaggacacgctcctcctctctaatggtcggtctacttccggactctggtcacggggagctccatggtgatcgagctaacccatttggtggagatgcggtgcacgaggcttccatggctcaaccatgcattggtgtgttagagtag

SEQ ID NO: 5950 - DNA, 447 bp, Oryza sativa
  misc_feature (172)..(172): n = any nucleotide
atgagcaacatcaagcttgagaagtggtacagatcatttctcccaccaaggatgacttcatcaaatactcgtcaggcgttcatctacacctacaagacaaccattttcggctttgcggtgaacatcaccgaagctgaaaaagattatgtcatgaagaataacggcgtccttnaagatggtgcaagcgtgtttggcaatggaaatggcacagcagctggcatggctcctcgtgcacaccttgctatctacaaggtgtgcagcgataaaggttgccgtgtatctgacatacttgctggcatggaggcggctattgctgatggtgttgacatcatgtctatgtctcttggtggtccagcgaaaccattttacaatgatataatagccactgcatctttttctgccatgaggaaagggatctttgtacactactgggcaaatgcctggtag

SEQ ID NO: 5951 - DNA, 1854 bp, Oryza sativa
  misc_feature (54)..(54): n = any nucleotide
  misc_feature (72)..(72): n = any nucleotide
  misc_feature (117)..(117): n = any nucleotide
  misc_feature (511)..(511): n = any nucleotide
atggcattggcatcagacaagttcgtcctctccgccatcgtgctcgccgtcctnaccgtcgcggcagcggcngcgggctacggcggctacggcgacgtcggcgagtactgccgcgcngtgtcccggaacccggtcccatcgtgccggaactacatcgcgcggtggtgcgccgtcgccgggggccgcctggactccggcaagcagccgccgcggcagctcctggagccgtgctgccgggagctcgccgcagtgccgatgcagtgccggtgcgacgcgttgagcgtgctgcctcatggtcaagactatggaacctatacctgtcctgatggtgaagagagtgccactctgatgcatgcggtgcatatgcttagtgctatggatgcagtaagtgtggagcgagacaaagcagctcatgacagggaaaactggaatcgaggcaagatttgcaagttggagagcaagatggtgaacacgcgcaccggaagtggaagtggaagtggaagtggagctnctaacaatggaggagatcccacgctagctcagattctggcccaacaaacacaactgatcaatctgttagtgcagcaggcacagaatcagcaggtaaacaatcagaaccagaatccacccccacctccccaaaacaagctggcagatttcttacgtgtgagaccccctaccttttcaagcaccaccaatccagtagaagcaggagattggctgcatgcggtggagaagaagttggatttgatccagtgtactgagcaggagaaagtttcttttgcttcgcatcaattgcatggtcctgctgctgaatggtgggatcattttcgccaaggcagggctgaaggagagcctattacgtggcaggaattcacggccgcttttaagaagacacacataccaacgggtgttgtagctctaaagaagagagaatttagagcactcaaccagggatctcgttcggtcaccgagtacctccatgatttcaaccgtttagctcgttatgctccggaagatgttcgcaccgatgaagagcgtcaggagaagttcttggagggactgaatgatgagttgtcttatgccttgatgtctacggatttccgggatttccagcagttggtggacaaggcgatttgtcaggaagacaagtataaccggatggagcagaagaagcgcagggctgcccaattcaaggcacaacagggcagtaaccagaggccgcgcctcgttacgggacctcaagtttcatcgtaccctcaaggaggatcttcatcagttatccgcccccaacgccagttctacaacaacaatactggtaatcgtggcaatgacaaccgcaacatggttgctcgtcctgcagctactccagttcagaaccagcccgtcaggaaggaacaggggaagcaagccaggggtgtgcttcaattgtggcattatgctgataagtgtcctaagcctcggcgcgtgaagaacgctccagccccgaacaactccaatgttccagcaccgaaggcacgtgttaatcatgttgcagcagcagaagctcagaatgcaccagatgtggttttggaaatagaagaagttcctttcccattctcgcttatcttgctagaatccaaagatctagatgttatcttagggatggactggttatctcgtcacagaggatttatagattgtgccaaccgtaaggtgactttaaccagtagcaatggggaaaccgtttctttctttgtgtcctctcctaaatatcatggtgtgatcttaaaccaagttgctctacaagagatccccatagtacatgtcgcgtcccaaaacgactctaaaatacatcctcaaaattgtgcctaa

SEQ ID NO: 5952 - DNA, 1113 bp, Oryza sativa
atgaggaggatcacgtggctcgcgacggcggctgcggcgctgtgctgcctcgtcgcggcggcgagtgcgacggcgcagtgcaggttcccggccgtcttcaacttcggcgactccaactccgacaccggcggcttctgggccgccttcccggcgcagcaggcgccgttcgtgcaagcgatggggcttccgctgctgagcccttacctgcagtccgtcggctccggctaccgccacggcgccaacttcgcgacgctggcgtccacggcgctgcagccccaacacctcgctgttcgtcaccggcatcagccccttcttcctcgctgtccagctcaaccagatgaaggagctgaggaccaaggtgctcacctccaatggcaacaacgagatagtattgctaatctagttaagattaattttcagaccaacttcctgcacctgatgttctgcacaatgctctgtacacaattgacattggtcaaaatgatctcacctccaacctgggatcacagagcattgagacggtcaagcaaagtctccccttcagttgttagcaagatctcctctactgtgcaggaattgtacaacattggcgctcgcaacattatggtgtttaacatggcgcctatcggatgctacccggcattcctcacgaaactcccgcataccagcaatgacatggatggatatggttgcatgaaaacctacaacagtgcagtgacctactacaatgaactgctgaacaatagcttggccgaggttaggaagaagctgcaggatgcatctattgtgtatcttgacaaacacgctgtgacgctcgagctgtttcgccatcctaaagctcatgggctgaagtatgggactaaggcttgctgcggatatggtgatggggcttacaatttcaacccagatgtgtactgtggaagcagcaaattgctgaatggccaaacggtaaccgcaaaagcttgtgctgatccacagaactacgtgagctgggatggaatccatgcgacagaagctgcaaacaagatcatagcatcttccttgatgagcggctcatattcatatccaccttttgatctttccaaactttgccacctacagcccatagcataa

SEQ ID NO: 5953 - DNA, 312 bp, Oryza sativa; identical to SEQ ID NO: 1107

SEQ ID NO: 5954 - DNA, 714 bp, Oryza sativa
atgggaactgtttggtatggcattcctagctctaatcttctacacacatatggtctgctgcatgtgttgaatggtcttgtagatgtttccatgcttggtgtagtgactagtgccttcaataacatattaaaaccacctgaagatagtacagatgcacctgctactgcagcttgtaaactcagcataccatcaccagattacagctgttgcacctcatttccatgtctgacaaaatcacccgaggcagttgaaggatcgaggaaagaaattcagagatgcttcactttggaagaagctaccgatacaattctcctctgcagttctattgttcatgaccttgcatacaaggcagcgacaattgcactggaccatgagcaggaacgagtacacgcagagcctactcgcccatctgttaccatcgttggaaagtctattccaaaggaggatggtttacttaagctgactcacagacgaacgcctaaccgtaaggttaaaaggaaaagattggaaggtgaaacaaccataaccgaaaatgctgaaaagaaagatgatatctctacagaccactcacccgtgcgttcctcttctggaattacaaggacatctgagagcatgaagcctccaaaactggaatccaaaccaggatctataggtgttcttgcatgcatctgtcatcatcagcactgcttcaatcacttgtatgacaacctatag

SEQ ID NO: 5955 - DNA, 1452 bp, Oryza sativa
atggggaattcttgccaaaatggaacctatgggaacaattaccagaacagcaaccggtttcagaatgaccgttttgcttctcggtacgttgatgggaatgatactgaggattgctactcgggctcgtcaagggccagcttagcgggtgctctgcggcaagggctgaacctaaagtcccctgtccttggatacaagactccaaatgtaagggagctctatactcttggccgggagcttggacagggacagttcgggaaaacatacctctgcactgagattagcacagggtgtcaatatgcatgcaagactatcttaaagagtaatctccgatgtgtgtcagatatcgaggacgtgcgccgtgaaatccagataatgcaccatctttcgggccagaagaatatagtgacaatcaaggacacatatgaggatgagcaggccgtgcacatcgtcatggagctctgtgcaggtggtgagctcttcagcaagattcagaagcgaggtcattacagtgaacggaaggctgcagagcttataaaaattatagttggcatcatagaaacatgccattcacatggagtgatgcaccgggatctcaagccagaaaatttcctcttactggacgcagacgatgaattctcggttaaagcaattgactttggtctatctgtgttcttcagaccaggtcaggttttcagagaggtagtgggaagtccatattatattgctccagaggtattggagaagcgttatggaccagaggctgatatatggactgctggagtgattctctatgtattgctgactggtgttcctccattttgggcagagcatccatggatatgtgataatggagtggctactaatcgagctctggatccaagtgtacttcctcgtctcaagcaattttctgcaatgaataggttaaagaaattgtctctccagattattgctgagcgtctttcagaagaggagattgttgggttaagagaaatgttcaaggctatggacaccaaaaacagaagtgtggttacatttggtgagcttaagggactgaaaagatacagctcagtgttcaaggatactgaaattaacgacttaatggaagcagctgatgacaccacctccaccatcaactgggaagagtttattgctgcagcagtgtctcttaataaaatagaacgtgagaaacacttgatggcagcctttacatactttgacaaagatggaagtggttttatcacagttgacaagcttcaaaaggcttgcatggaacgtaacatggaagatactttccttgaagagatgattctggaggttgatcaaaacaatgatggtcaaatcgattatgctgaatttgtcacaatgatgcaaagcaacaactttggacttgggtggcaaacggtggaaagcagcctgaatgtagccctgagggaggcaccccaagtatactga

SEQ ID NO: 5956 - DNA, 2058 bp, Oryza sativa
  misc_feature (1377)..(1380): n = any nucleotide
  misc_feature (1482)..(1482): n = any nucleotide
  misc_feature (1738)..(1738): n = any nucleotide
atggcaaccatcaaattccctatagttttctccgtcgtttgcttgttcctcttgtgtaatggttcgttagcccaacttcttagccaaagtactagtcaatggcaaagttctcgccgtggaagtccaagagagtgcagatttgatcggttgcaagcatttgagccgattcgcactgtaaggtcccaagctggtacaactgagttttttgatgtctctaatgagttgtttcaatgtactggagtatttgttgtccgtcgagttatcgaacctagaggtcttctgttacctcactactccaatggagcaactttggtatatgtcatccaaggcagaggtataacaggaccaactttcccaggatgtcctgagacctatcaacaacagtttcagcaatccgagcaagaccaacaattggaaggccaaagccaaagccataaatttagagatgaacatcaaaagatccaccgttttcaacagggggatgtagttgcattgcctgctggtgttgctcattggtgctacaatgatggtgatgcaccaattgttgccatatatgtcactgatatatacaatagtgctaaccaacttgatcctagacacagggatttctttttagctggcaacaataagataggtcaacaattgtatagatatgaggcaagggacaattcgaagaacgtctttggtggatttagtgttgaactacttagcgaggctcttggcataagcagtggagtagcaagacaactccagtgccaaaatgaccaaagaggagaaatagttcgtgttgagcatgggctttccttgctccaaccatatgcatcgttgcaagagcaacaacaagaacaggtgcaatcgagagactatggccaaacacaatatcaacaaaaacaacttcaaggtagttgctctaatggtttggatgagaccttttgtaccatgagggtaaggcaaaatatcgacaacccaaacctcgcagatacatacaaccccagagcaggaaggatcacatatctaaatggccaaaagttccccattcttaatcttgtacagatgagtgccgttaaagtaaatttatatcagaacgcactcctttcacctttttggaacatcaacgctcatagtgtcgtgtatattactcaaggtcgtgcccgagttcaagtcgtcaacaacaatggaaagacagtgttcgatggagagctccgtcgtgggcagcttctaattataccacaacaccatgtagtcattaaaaaggcacaaagggaaggatgctcatatattgcattgaaaaccaaccctgactccatggttagccacatggcaggaaagaattccatcttccgcgcacttcctgacgatgttgtagcaaatgcatannnnatctcaagagaagaagctaggaggctcaagcacaacaggggagatgagttaggtgtgttcactcctagtcatgcctacaagagctaccaagacatatctatntctagagcacccgaacaacatgatgaacttgataaaagattattgtgggctgaactttccaaaacaagtaggttgcttgatgacaatacaaccggtacgaatgagttgaatgttgttagttcccaacatggagaacaattgaatgcaaaagatcaagatgaactgcaaaacatcaaggagaaggtaagaaacaaggggaagctgattgcgctaggaagttcccctttgaactccgcgatcaccagtggtcctcttngacacgaggaggaggatccaaatgatgaaaatgagaaggggcaccaccgagtcgcccacaccggtcatgacaatgacctgatatgcaaaatgatcaaggaatgctttgatagtattaatcaatcaactgaacaaatgaatcgagctttagccacagagattgctcctcatcaatcttctaatgagcctagagaagtaccaactgaagtagagcataatatgctttctaatgtagaagcaccagttctagcccaagttgtagaaaatatctttcaaaatgaagaaataatagcatcaactgaagaaaccaccactacttga

SEQ ID NO: 5957 - DNA, 1263 bp, Oryza sativa
  misc_feature (9)..(9): n = any nucleotide
  misc_feature (365)..(365): n = any nucleotide
atgggggtngggtacagcgcggcggggttggcctgggggtcgtgcacgacgggggccctgaggacggaagccgaaggggacgggtggtggaagcggagcgagatccaggtgaggagcacgaagagggagagcaggaatgggaacgacgccggccgcttcaggaagtggaccagcgacgacggcagcgagggggacggcgcggcggcgggggcggcggcgaggggcgtcgtctgcgtgtggatttgcagcgcgatggctctcctcgggttcgccatggatgggtgggcggcgagctgctgctgcttgctgctggtggtggtggcgctgcccggactcggccgccgccgcggcgagctgttgccggngaacagcccgagccggctcctccgtgagctcgcggagcggaagaaggccgtgtccccgaagaagaagcacccgccgcggcgcttcatcctgaagccgccgctcgacgacgagcgcctcacccagcggttcctcagcagcccgcagctgtcgctcaaggcgctcccgctgctatcctcctgcctcccgtcggcgccgctctccgccgcagaccggacatggatggacgagtacctcctcgaggccaagcaggcgctgggctacccgctcgccccctccgagacgctcggggacggcgacgacgacggctgccccgcgcggcacttcgacgtgctgctctacctcgcgttccagcacctggacacgtcctgcgagcgcacgcggacgcggcacgtccggagtggccactccaggctctggttcctgggccagtacgtcctggagctcgcgttctgcgagttcttcctgcagaggtacccccgggaatcccccgggccgatgcgggagcgggtgttcgcgctgatcgggaagagagcgattcccaagtggatcaaggcagctagccttcacaatttggtgttcccttatgacgatttggataagatgattcggaaggaccgggagccaccagcaaagtggttggcagagaagcatcggaggttgctaatgaacaaatactgcggacgatacctccgggacaagcacctgcaccactacattatctacggggagtcggtgcaagacagatttgaacacaaccgccggctgagaaatccttccacgaccgccgtccagcaagcaatacacggccttgcttactgcgtctatggcaaaccggatgtaaggcgattgatgttcgaggtgtttgacttcgaacaggtccagccaaaagcagtatga

SEQ ID NO: 5958 - DNA, 864 bp, Oryza sativa
  misc_feature (103)..(103): s = guanine or cytosine
  misc_feature (115)..(115): y = cytosine or thymine
  misc_feature (117)..(117): s = guanine or cytosine
  misc_feature (120)..(120): y = cytosine or thymine
atgccgcagaggcatacaaagctcatcacggccgtccagatccgatcggacgcctcctcctccgcctccaatggagcttcccctggacaaggccgcggcccgstccaccccaatygsgtycccgccgctggggcggcggcggcggcgaaccagtccccggcgtctctgccactgggaccacccgcggccgcctccgccaagcccctcgtcgcggccgccaacccgccgctgctgccggtggtggctccggcggcggcggcgcccaagtcgtcgtcaggggccgtggaagagagcaaagagggtgtggaagagagcaacaagagcaatgtgttgaccattggcagcatcaggagcacgctgatgaagcatgaggacaccatcatcttcggccttctggagaggtcacagttctgctacaacccggacacctacgaccccaacgcttccaggatcgtccggttcaatggctccctggtcgagttcatgatggggaggtacaagagcccggatgagcatcctttcttccctgagaatttgctggaggtggtggagccatctgttgagtatgagaatgcactctccaagaggattcactatggcaagtatgtggcagaggctaagttccagggggcacctgacactgacaagctgatggaattgctgacgttcgcgaaggtggaggatgacgtgagggcccgcgtgatgagcaaggccatgaccttcggccaggtggtgagtgaagatctggagaacgaaattaagctcaagatcgagccggagctggccgtggagctgtatgacaagtggatcatgccactgaccaaggaagtgcaagtgcagtacctcctcaagaggctggattga

SEQ ID NO: 5959 - DNA, 1858 bp, Oryza sativa
  misc_feature (460)..(460): y = cytosine or thymine
  misc_feature (600)..(600): r = adenine or guanine
  misc_feature (783)..(783): k = guanine or thymine
  misc_feature (803)..(803): r = adenine or guanine
gataacgtagttacaatgcaattacacaatgcagttatagtagggtgcaactggagtataactaacatgtaactcaattaattttttaaaaacatgcaacagatctaagtggctagcacgcacggcttgtgggatggatatcctaggttcaagcccttgcaaggacacaccttaattctcgcgcagatttttttttccaaatctcgcacgaatcatggcgtggatcgcacggccagaaaatcaaaagttttcagcctccaaaactgtcgacggctagctagcaaaaccgtaaaactaaacttactgtaaaggagaaacacggaatctcgcggaacttgatcacatagggaaccctagctctctactatataattagccaagccatcatggagagagatcaaaatctctgccaaatttatttcttccttcccaaatgaggggtgcagtccaccccccctcyaccccatgtggtacaatgtgcagtggcagtcccccatcaaggcaagcaagcaaccatagtgatcaatatgctagctgcacatatacctctctctctctctctctctctctctctctctcttagctagctagcaacaaacragggagctagggttttcttggctctgttgccataagcagcaagtgtaccctgtccctggagagctcctcatggccatggccaacctaacaaacctagctgccaagatcggcaaggaggaggaaaccgggtgggcccacactgtcagagggtggttacaagtccacacacatgttgctttccakggtgccttgtgaggggcatrcagagagttgctataggctacatacaccttcctcgcaattgcatgtagtgttcatgattttataccatgcccatgtatatatagctgcactgtgctctgatgagtaatactgttgcattatattgcatgagctacatacactgatatctctgaacttttgtgtgcgtgatatatgcactgttgcagtgtgtgttttgtgtcacaagctaggctcgtgtatttgtgcagagatcgaccagagagtatatgctagtgcatcatcattgcatgctgcaagtacacacatggatatgcacactgatctgatcatcatcatcatgaagtcatgcttatgtctgcatccgtttcttgctttgactcactatctgatcctaattacacactgatgcaggggtaaatgtaaaactagactagctagcatattagttacagttaaaaatgtagtttgttgctttctggatatttactactccctccatctacttttgatttgatttggagtagtacactgatttgatttgcaggagtagtagtgtgagagtgtgtgacagagagaaagcattgtgtgttgcacattactacaagctctctctcctatatatgtctctccttctgcacctcctgccttagcctttgaagcaagcttagcacttcacaaggtatgtacatagcacattactactcctgccctatctatctaccctgttcatgagtaattcaagaaaaaaaaaaggacaccttttctagctagttcttcatcctttcgcagcaaagagtttttacatctctagctactagttgttcctcttctctacatgaaattttttctacttctgattgcaccctttacatagctgtggggggaaatccaatttgagcacccatgccttatgttgattttaacaaaattcgtccatgtatcgatatgttcataacttggccatttctgttcttcttcttcttcttcttcttcttcagtttcctcttgtgcagaagaaggagaaacaaaagaacacagaaattaaattaaactcgatcaggaaggtatagcaggc

SEQ ID NO: 5960 - DNA, 1970 bp, Oryza sativa
caaattttgggtcatggattagtttcacgcttataaaaatatttacttcctaaaatattttcttctactatatgaagttatttctgaagtttattttctaaaatatatttttttattaatcaattaaacaatccgtctcaatagtctgtgaaaaaaaatatatttcaacagtgtctaaatgaaaaataaaaatcgaattaaattaggcgaaatgaaaagaaagtccctgaccgaatcacgcgtggacgaggcggccgcagacagcaccacggccagtgcagggggggcccaccggcggttggtggcgggcgagcggccgcccggaggtggggcccacctcgtcagtgtcagtgtgtgcgcgtgtgttggtgggtgcgggtcgctgtccgccacccaactcctccctccccacgtcgcgcggcgcccaccgtccgatcccgaccgaatcccatcgtgcggccgcgcccacccgcctcccgtggtgagggggggcctataaatgggccgcgcgagaccaaggcccatctcgccgtgcccggtcggatctaattaatttacctcctccacctcctcctcctccccccgatcggatcggcccggctcctcctcctccgccgccgccaccgccgccgcaggtgagccgccgattcccctgtcctcgttgctggtagcgttgtcgcgtgtgtgttgctgctgctgctgctgctgctgtccggcttctcccttcattcttgcggcttgaaaagggagaggagggttttagcgttcttggtaggatcaagctctcaggttggatctgagctcgtggttggttgtcttgcggacgtatcatcgtgcctagatattgatttgtttgtgctggtttgggagggttataaggagggtttattgcttttctttcgatcttgtggtatggtagatttagatggggtttctttggttggatttaggtgttgtaagttttatttttgtcatgcttgcttattattatggatggagatggagagagaagcagtaggatgacttccttttagatgtttaataccttgatgcttatcaaacggcttgctgataaacaacatgctagagcagtggttttagtgctagtattatgtctttggctgtcagctcatttgactgttctgcggtagattcgagtcatccccttggtcttgggagttggaattcttataaatgaacggaaaatggaaaaaaaaattgattggtgccacttcaaagttaaatatgccaagacgaattgatatgtttctgctgttgttttatgctcttgattagttgatgcgcatgttcaatgatttatgatgtttgtctttgtggaaagattacatgtaaagagtatagtagaacccctaaaagctagccagcgatttcgctctttttttccaggtctccatgatatgtttacccctaaaagtggtatatttatgtgatagttacaatacatagtggcaccacgattgattatgcgtttatgctgattccggcagaaaattgttagattccttgtgctctatacctgcttgttgcgcttgtagagaatattacaaatacctaacacttgcccaaggaacttaggaacttagtcaactctttgtagggacaactattttagcccaaaattgtggtcttgtcaggtgccaacaaaacagcatcttggcgtacataagctatatagaggattaaaaggaatgttttgttccttgctactgtttttttaacctgtttactcaggacaaattttgttgcataaaccatttgttctagggatcagtattgtcctctcagtgtgttatgtaagcatttccagaaatcaattgtcgctatcagcttccctcacattagctatcacttatacccctttttttctcataggctcaccatgtccattttattcatgatatttctttgtctaaagtatgtgaaataccattttatgcagataggagaag

SEQ ID NO: 5961 - DNA, 2003 bp, Oryza sativa
  misc_feature (134)..(134): k = guanine or thymine
  misc_feature (1557)..(1557): r = adenine or guanine
tgtgctgtaatagcttgcctttgctaaatctcaagtgcttttccattgttttgcatttctgtgagacagaatcctgtttgaaatgaatcactttccattcaaacagtgtagagttgattggctatccaatattkgcatataagaaatctatggacttctatatatttatatcattgagttgtagcttattatagaacttattttattctgtaatctatcaagttaaatgatcttttgtcatacttggtcaaaatggtgcttattttttggtatgtgattctttaccaaattaaattatcactctaatgttgttatacttatatccaatttttaagctttaagagtaactgcagctgtagtcatttgaagttttatgtaacaccgaactttcttattaaaaacttttaaaacaataaaatatctatgtatggtagcttttctgacaattaagacagttgctaatctgcaataattttttaggacttcactacaaaggcaagaaaaaatgactacagatgctcacaccacattacctcacctagaatttgtcttaagtaatagatatgaacaaattgctttcaaaagactgctatatgaaatatcagctagacctcattcattaatttgtttgcaataaacaaaagagataatgatggctgtttctgcaatattagtacttgaaggagcaataccaccttaggcatttgccattttatgttaaagtattctgcaagataaactgattcagctgaaagttgttaacagtatatatctagacattgtattgtctaatcattctcacattgtgatgacaaataatgtcttcaagatcaatatgacattcataggttccctgaaataaccaaaataaaatgtgttacatgaaaataaggacatgagaaaggaactgaccatggtcttcctcatctgcagatccatattcatcatcatcgttaagatctacgacctcagggccagcattatcactctcaagcgcttcaagacgagctagtgcagcctacatgccatcacataaatgtagacagaaattagagaaactaaataactgggaatcagtaaatttcaaatatccatggataaccaagaaggcaaaattcttttgtactgaaaactctgaatcctaaacagaagacgagtaaaaatgaaattaagagtacatggaaagaattaaagctctatatcctgtagagttccttctttgacaaagggtcataagcaaaacattagtgctggtataattaaggcagagcatattcgccacatatatgagcagtagaaattctacacaaaactcttcatgcaaacatctgcagaggtcatttactaaaactaccggtcaagatggcccaatcctttcaattgctctattttaacacaaacaaaacctgcaatgtgtggcccttaacattggagcaataatcaagcaaagtctggagcaggcgtttgttaccatgaaggttcagtacacaagcccaatttgcaactataattcagaacaataatcaagtgtatttggagggatttcacaaaaaaggraaataatatggagaaattagcggtggccactggcctggatattattaacacgtctctacctctctaaaaaaaaaagtccattacaagctttcattgcaataagagaaccacaatgttcagagaacgccccaataaagggttgacacaaaaccacattaggtacatttcaaactgtaaaaactaatttctttccttttcttaatctccatctaatactggtactacaccttctgaacggccgtgagaagtgacaagacaagtcgactactcaagtgctaaatcaagagatagtattgaatacagcaagacataggatgaaatggatgtaataatatctttggattccaaagtcgactaaatcaagtgcaagtaaggaagagataaactagggcaagagctttaatccggagacaataacaattactactactaagcagctgttaatg

SEQ ID NO: 5962 - DNA, 1923 bp, Oryza sativa
gcgcaaaacggtataggtctgaacgctatgaatccctgagtggtcccagttaagttaggttggtctgattatctactgctactatgtcaaaattttcaattttgttattggtaaattttggtaaaataagtatcatttggtgcatgcacatctcctactttactgtaagttcgtaactggtgagtttagtccacatcagtattaaaagttgagggcagtccacatccatcaattagcatgtggtagagatggcccatggttgatgagctagattgcgcgctccaactgtaacttctataataaagaaatttaaaatgtttgtaatgctacctagcactaaaatctgttggtgaattaactataggtacatatattatattactatacctctccatggagtgagttccaaaattaatctcataattaagtaagagcaaaacgaggaattcctttatattttgtcctcaatgttttttcttcaattgttaagaggataatatcttatcctcttaataattaaagaaaaccgttcagaaaaagataagataaaactcatcgtgttagcttattatgtaccttttattaatctctactattataaaaattaaagatgtttttaccgatactttggtatgccatcgtgtatgagtcggtttttaagttcgttcactttaataaatacatatctgtatttgagacgggttttaagttcgttcgtttttagaaacacagaaggagtcatataagaaatctcttaaaaaactcgcttgctaacttgagatgatcggactcctaattatagctaatgattttctatatatatatccaagctgatttccacagtgaattttaccttaactaaactatataacaataataatattattagaatagctttcacccgttgcaatgcatgggcattttttatctattatctcttaatgttcagaaaaatctttgcattttcacctgcatatatttgttctaattagttcaaccgaattaaaaaatttatcctcaaatagtagggacatatatacctttccaacaaggagaggaaacctattcaatcaaataaaagaattgtttgaaccacttttccccgaaactgactttcaaactactagaaacttatgacaaagaggtttccagaaatggtcgtttttttttcttatatcaagattattgtaccaatgtgagatgaattctttggtgttatcaatatttttgtaacgttggaagtattccttccgtaaaagcaacttgatttttatctatgcaactttacaacttatcatttgggatgaaggaagtaggatattggtgaggtatttactctattaccgtataaacattttggataaacccatgttgctctcccttcctatcgtcttattcaactctacattttgttaagaagtgtgtggacgtatgagcatgagtatgtactacctcatgacgagtggtttcaatttcacccttttgttgagaagtgtatgaacatgctagcctaaatactccgtaaaattcctaaccaaagctaaatactccctaccatttattttaaaattttaaaaaacccacccttttgtttgtatatagtcagtgagtatgttcgatcggccacttggttgtaatactgcttgtataacgttacatactcggcaatacaccccggctgtgttaatttggcagcgtgtgctgttcacttgtacattactcatcaagtggcggacaagttgtagaaatgtagaggccaaaccatcaaaaagccaaactactccacacaagacaccgtatgcacaaacgatcaacattcccatcatgcccatccagcgtgacatcaaaagcggcgtcctaggaagccagccaccattccatgccttcccctgccgattccaccccctgctactaccagtctct

SEQ ID NO: 5963 - DNA, 1003 bp, Oryza sativa
caagccgctttcacttgacggaacttgctcaggctgtttgatcctacacgcagagttataagcttttaattagatgttattctaagctatgagaatgacccatctagatcctttttgtatgttcaataaagtgcagcctacatatatctaaagaaaaatgtcacacgaaagggtttgtattggttaacagctatttaagcttatggtacagcagctgcagacttctctgagttcagatagacaaacaataatctaatcttaacacatagagccacatttcttaaagtatttaacaaaaaatatggttgaatcaaaggtacggaaaacatgcttgaactattgcatcagattaaaactagtgacctgaaagaatctaaataattttgacacaagccttacctgtagttcaaggtatacactacaggtgaagttaagattgattttcatctcactgtaggtccaactttttttactataatacttgcaaaaaaaagaaagaaagatttggccttccctctcaaaatcttcacaaacacataaaacttcaacttgaaagcgcggcagagcgcacttagctttcagaaatcagaattatgcgacgtccttaatacgacacaatatgctgatgcttacgaatattgcagcaaggcacaagagaatacatgaatgaaactacatcaatctaagaataaagaacaaccattgtgtccagtttccagttgcacccaccgccaccatatattgtggtagaaacagtcactaggcaaggtatatctctaccgtctctgttggtctcatttggcacttggacccgtcaaatatagaatatgatactataaaaactattaagaggcatcataagcaaactgtcactatcttttaatcaacagtcatatcgctccaatccagttacttaagcacatatggccaggaccaaaccacaatgccagtgagaccttgactaaaatcatgatccctaactttataccggtgcaaataagcc

SEQ ID NO: 5964 - DNA, 1993 bp, Oryza sativa
  misc_feature (319)..(319): m = adenine or cytosine
ggagcatgtactctttataactaactttacatgtcatcctctacttatcttctcttcctctcttcctacttctctcgatcttgctcctcgtagccccatcattattattgtcgccactttcctatcaccttacatgatttgctcgtccttgtaaaaaatccctttgccacaagctgatgtcgttgcagccatcgacaagtcaaatagccaatgtcgtctataagctcaccggtactacccttcatcagagtttgtgcatttttcactggatcgcatagagatggaatgctgagctagagcgagaggtggctatagcttmaccctcgatgtgtccatgaggtcgccgccggcgtgaggtggctagatctagtcgttgcaacaccactagatctaaaggttgtgtggccatgaatcgagttagcaagggcgaaacaatatagggtattggtcgcctcaagctcatgggaaggggtgtgtcatttttaccgttgccttgagccatccaaatcttagatacgtgagatcatcttcgtcatttcggtggcctactaccggaacatggttgttgcatatattccatcggcacaatgacatggagccccaccatgcaacacaaggtaggtgttaagaggctgagctgtagacttgcggtgcatgtcttgccagaaagctcaatggagccagtggacttagcatgtgttatttggcggtttcatgaaagcacagcacacacattagcgtgtttagtaaggaaaaaatatacatgtccaactgaaccaattctctagcttgtgttgaggatgtgcatgtgatatgtatgttaagtgttcgactattgtatttgaaagaaaacaacataaccaatgaatcgtgttcctaaacttcccatttgtttgttcttctttagcctttttggcaaacggtggcacaaaatggtttgtgtggattgaaagcattactagtgactggattaatgtactatggtattaaacaaaccactaaagaaaactatcgagttgatatttaactcttaaaagttaaccaaaatgtaggactagttccaaacagcaccaccaaccaataattaaattataaaagaagggagcatatatattaacataatacaaatgttcatccaaaattattcgtttgtctatctagatttgactaaattaagtagttgtttaactagtatatcaggattcattacttgagtggtggtagaaatatactgtgcgcagggaaatcaaaggccataaagaccacgatgtttttggtagcttggaaaatctagagtgaacacaatagacaagtcttcaaccaacaagagagagagagagagagaggaaggtgtctcaaattgttgaaagaaatcaacatttgagttatgtgtagagtgaaagacttagcgagaacatctagcttaacatagccgtgtagtttatgaagactccacagtcatatttttttcttatgtttttgtcgactgtaagtattgtttgtactgaaatattgggcctgttcactttgatgctattttcaaccttaccaaattttggtaaaattaccaaaaaaatatctacatttagtttgctgctaaattttggtaactatataagaaatcctaccaaaattttgacaactatgccaaaatttttggcaatgccaaatttcggtaagttttttttcatcaaagtgaacatgcccattgttactcattcctaatactataggaacagcaatatttagaaaaaaaaacagtcatatttgtttgaaaaacttttttctcagctttgaagaggttactttgagaacaagcatgagaaggccacagctgtcattttcagtctcggcctaaagcccaagaaagaaaaaggcctaaaccccttaggcccttaacgccaccaagagtccaacaccaagccgcaccagatctccctcttcccgaaccccagcgccgccgccgccgccgccgccgatcgcatcgggccgc

SEQ ID NO: 5965 - DNA, 1940 bp, Oryza sativa
ttcgaaatcgtgcattcaacaaagccgattttgctcgggggcaaaatgttaatatgcttctaaggaaattaggagacacgaacgatgataggtacgacctcacatcttgaagtcgccatttgttgggtctaagtgcaaggtgctcggtgagtaattatctagttggaaatatctataccaagttgtgtgaatcgttcgtaagaaattattgatttgttaggatattacaaagagattgatttactaaacacttagaacctcatatggccgataaaaattattgccctaagaccacatgtcctatgcttttcggctcacaagttcgccaaaaaggcaggggtatgtgttaacgcctaaatttgacatctagacacgaaatagaaaaacattgccaaatttgggagaagatcaggtttcctatggaaggccggtctgaccggccacacaccgccgatctgattggcccaatggcaatgatcagatcggctgatgactctgaatccaaattttgtcgggtctcgggtttccttgtttgggcctgaggtttgttttaatcctaaaaatgatctctcatcataataggacgtgggaaaaaccctgtgaggcaagaataacctttttataagggctatggcaagttggattctaaactcccaaccacaacctctaaaattaatcgaatcgttttttttacctttactttgcagcatatcttctacactatcctagtttagtccatctttgttgatttgtgccataaatttttcgccttcactacatgagtgcgatacccctttgtagctttgtcttgtaaaccttctgtttcgcctacgagacgggtggttatcttcaaatcgatcagctctactagctggttaaatcttcaaaatccatcttggtttagagttttctagatcgagatgattggcgactccgttaacaccgcaaatctttaagtgagtctgtgttggtcagaaaaagcgccaacaagtacgacggcagtgcctgcgagggagacatgacggtgatggatgagaaggctgaggcaacagtgcttgcacgttttgggagctgagggacgcgtcatatctgctattgcggattatagattaaattcagactcggtgacaaattaagggacctagagtgaacttattcccaaaaaattcatttcggcccatgagcatgtagtcccaattatcgggccccagccctagctctataggaccgctcctgtccacatcttatcaaaaagttctgtttgttctttttatcttgagacggattaaggtagagaattgataatttttatatctttgtaattcgcgtacttgtaaataaagttacaagaaggagttctaccattttcaacgagaacgataaaataactctggaattgggccgagatacacatactcccctcttttgtagaaaaagtccaattctaaaaatagacaagtgcttgtccagataaattcttagaattaacattttttttaatacaggtaggtttgctcgttgttgtttggaattaacatgccattgttttaatttcacctctccaaaaattgtacttcttatttgatcctccaaatgttcttaaataaaaaggtcattaattgtacttcttatttagttaagctctacaattgattgtgatacatatttgttggcgaacggcttcgtcagactctcgcggcgcgctccacgcgcacgacgcgcaccccgcgcacgacgccgcgctcctctcgcaccactcgcaccgctgcacgtcccttagatcaggggattagttaggcccaggcaactcccaagccttgttgtacatgtataaatataagctccattgatcaatgaaagttacggttgatccaaatctccttctacatggtatcagtgaccctctgatcttagtcttccgctacctctcccttgctagc

SEQ ID NO: 5966 - DNA, 1913 bp, Oryza sativa
gtacccatgccttgcaacaatgtccggccacacacacataaaatggccggccacacacacagaacgagcaagcaagcacgcacgcacgcactcgcacggactacttcatttctgcaacaacttgtaaagggcactactacgctagtgctaccgggattggaatgcttgggccctgtttggaagattaacccagggctaattttgagaaccaatgtttagtcttgaattggtaagctaaatattagtttagggtaatatgtttggatccataggctaattgagggctaaaagatggagagagagtaaagagagaggagagattgagggagatatggctgctttttgatggtccccacaaaaaattagccccattagcattccttggaggggctaatattttgaggggtctaattcactttagccctaaattagcccacatatttagatccttatagggtaatttagagctaaaaggtggaggctaataattagcccatggaaccaaacaggaccttggagccattgaaatctagtgcctagctaggagtactgtagtagtaattggatctcgcaaaaaacctttgtggaagtagtggtcaagatttgcacgccagccaatgcacaaagaacacaacgaaatcactcaccccaacaccaaaacagttgctcaaagaggcacaaagtgacgatgcccttgtagaaaagaaaaggaattctggtactatacgctctatacaggaatcggagccgtacaccatcagcaggcagagagtgattgagtgaacgtccatatgtaagtagtcatgcagattgtgcttttgacagtctctcatgagtcatgtgtgcatgcatgtgggcaacccaaacacattttatactgcttctgctacacaagaatatgcagctctgtgccgtatccagaagccaagattagcacatgaacctccctaaaaattaaccggacgcatccatgcctgcctctgatccgcggatcatgatggaggaccggttggtggctgaccaccagccttccagagattctgttctttcaaacgaaagcacgagctgcatctgcatgcttaagcgaacacctggcccagtagaaaaatgatgtaaacaattggcttttccgatcaccaggtggtggatgcgactgtaggtgcgtgtgaggctacgagagctggagtagcatgcatgctcacgagtccgcatgcagctggctgcaacagtgcaggtttgtgcgagaatggatcgcaacaagctactacaaaccagcagcgctctaatccgttaggattagatcatggtggtgcggaaatgcaattgatctgtgcgcatgtgctgtaacccaagaaatcatactgcttctgaatcaaggtacatcggtgttggaaagattttcagcaaatcatgatgtgtttgctcctcgctatggaggagagactctgcaagtctgcagcttgtttcttcagtttctctctataaaagataaacgaaaaggtttcttcagtcacaacccaatgggatttttggaggtctaatttttcttcgtgcagtgggctcgaatagtataagcccaaatagtaaagcccaagatgttaagaaatggctaattctggggaaaaagtacacggaaggtccctcaacttgtcacaaagatacaaaaatgtcctcgaaccgcaaaaccagatatgcggggtcccttaactatacaaaaccggtcacccgagatcccaggacagtattgacgtcggatttgtcctatgtggcggctgagtcagcgtgtgacccacgtgggtcccacatgtcaggatgccacgtaggacaatctctttcccctcttctctcccttcctctctctctctcactttgctcctcgtctggtggccgatgacagcaatgtggcgcgactt

SEQ ID NO: 5967 - DNA, 1976 bp, Oryza sativa
gggacccatagtcactgggtgtttgtttaaaaatttaaaaatgtagtgggacccacatggccacatgttatcaaccctttctcttctccctcggtgcattagagcaagtttaatagtatagcccactactagctccaatttatatatagccaattcatacaatagttgcttactatactattaatatatggtcccacctgtcatacacacattgtgtcttggagtatgcgctacagctagctacaaatctgtagcccactgctcttctcttttatcatttatctcattaaaatatgtttacagctggctaatagcttgctattgtacttgctcttagagcaaggatagtaacgtagccagcagccggctgaaagccactgccatgtcacttagccatgctttaaaagctcacctgtataatgggttgactataagctgactgatacgttacctaattaaaacatctaagcaattaatatatgcatgtgcaaagcatctgttgtggagcaggcaccggctcaatcgccagcaccgagttgggagcgggcgttttgcctcgggtacgacgcttcgagccggcgactcgcgactcgcccatttccttctctttcttggtttctcgctcctccacgttggatttggatgacgcagcggttgatttcgccagctgactgtacattactatacttgctcttagtttagacttcaggtgtcgccgccttcaccgcatcggcctcgagaacggcacgctaaccccaacgactcaccaatacttaattcttgatcagtttgaactcctgtctcccgctccctaaactccaagaggcacaccacgcattccagtaacctctattcgtatcgtgcgttagcgtgtagtaatccttcgtgagctgctcgttcttgctggtgatgtccacccgtggcggtgaggacgctgaggaagacctacgattgttgttgttggaggtgctcatcatagatgctggaggtagaggacacaggaatggagtgaacgcgacattgacatgctatcgtaggatttggaggaataaagtgtccgggaggccttgctcgtcttgttggaggtttctgctagtgaactcccaccaacccgacatcagctcaccactaatgtgtcctggcgagaaggggagggagaggagggagggagagaaaggggtgatgacatatgggtcgtaccacatttttaatttttttaatggatacttatgtgtatttttttaaatttttatcctcccaagtacgcattgcgtcaacgctgcaccaagttaaacaagccatgtaagtgccacatgagtcaaaactgctctcaatactatcgagggacttggtctacaatggttttagaggtggggatactctgtatctgagtttatggttgagggacacgaataaaattcaacctctacttgagggatgtaaagtggcttttgatatcttaatgggatacaatgccttcaacataacaatgggcttctttgagtctatttaaagcccaaattattgggcccaaatttagtagtagatgagtccaattaaaatcggaaaaagtccactttgagttctttaaaaagtaggccaaatctaattcctacccttcaatcagaaaatcggataggacgactccccgaactattaaaaccagtgcaattttactcctccagcggttttggagggtggttttgctgacgtggtggtgttgacccggttttcgtcccacgtggtgcttatgtggcatcagaactaaaaaaaaaatgtgggacctatttgtcattctcagaaaaataatgtgggacccactgacatgtggggcccacaatgtcatcctttccctctctattccttcttcctcctcccccctccctctccctcccttatctctctcttttatttccccttcggccgtggcggttgcgggcgggatgacgggtgcggctgcaagaggaggggactgc

SEQ ID NO: 5968 - DNA, 1999 bp, Oryza sativa
gtacatgtacctgcatcagaatctagttcttgatagaattagtgcttcgtgctcctcgatcataatcacagatcgagctcactagttcgtactaactggcgtgtggatttgggtcttgaagtggagcactcctgctgacggactgttggacattgaaagggcgtggtatatgaattgattccgagtaaatggattcggaggaccatcgatcattggatggtactcctccataattgctcggtgcttgatgatatggtccttgcacgggagatatactagtacttggtgtctgtgtgcacagccgcacagctataaaaggagaggaggcacctctgcaccctctctctctctctctctctcgcacacacgtcacaccacttcagggttatgctgcataaaaacgtctactgagtactagcagcactatgcagtagttctataatgtttgttctgtgcagtggtttactggtatttacgtgctgtacagctgatagtataatgaactatatatagtgctttagatacttcataacaacgtctactgaagtatatcctagcagcactatgcagtataaagttggctttatgcagctatactggtatatttacgtacagtaaagcacagtagagagtaatgcaggagtatatgataaactagtgcctggtaatgcagttaaggctcgtttgactagcaggggtgttactgcgatttactactatactacgacccttgcaatatggagtatactgagatactctgaacctgaaggcctgcatgtgtaatggcaagcaatttaatgcgttggaaaatgtaacctctgcagaagcaaaaggaggccttggcgatcaaactgaagctgcggccgaggcaggtggaggtctggtttcagaaccgtagggcaaggtaaaaaatcccccatcttgatgcaatatatagagtacccaataataagttcacaagcttctttatttactcatttcagtagaatctactcctcagtcctcgttacactatcatatactagagtattttctccgctataaatagctatgttctgtacataccaaggcaaagacttgtacacgagaatgtgacgaagaagcatacttgatcctatatatgttagccatacatagaagtattagcatttgaaatggttcatgtgacaaaacttcacaaaagacaaaaggcattagagtacagtcaatccggcttatgctaaatgatgatcttgaaagcgaccactatatggcatttctttacaaatttgcattagagcctacgtaaaagctagattgattactacacttattagtgttggtgcaacacaagttatactagcaggaccacaatgaacccatcattccaacaaaattatgcaatcttttccctcacgaaggtgacaaggatccttaggtatccatcttgaaactagtagtgcatccaagatgtgagacaacaaacaattagctagattctctagcctgataaagtgtaggcagttccatcatcacttatgaattgctgctagatggcgtagattactccatgatactcgttcggtttgattccaggattaaaaaaaaccgagttgcttgttccaatggcgccggcacgtggactaatcggcacgtgctacagctctctgtaactttgaccctagctacctaatgcgaaatcttagtttaacacgtcccgtgaaggatggcgtacaacttgtaacctgaacgccaatccatttcaattgatccctacaaaggccattgccttcactctacgtcgccgtcgaggtgacaatgatatcggaatggacgcctaaggtcaaattgagtaactactctagttcatgccgctattttaatctgcaatcaagtagtactgagctactaataatagtaatgtcgcgcagttaacttcggcaagttcatggcagaaacatcttttcatttgttaacgctcaatcgctgcccgattgttactgatcgtaacgtacgtggc

SEQ ID NO: 5969 - DNA, 2007 bp, Oryza sativa
tgatggcaccttcaagtaccagtttccttgaaatgagacattaatcatttgtgcttgtgtgccatttcactttcccaactttagaatttttagcaaggcaccaacccacctaaattatatatttcactcagcgatccaaaaggttggcattcaataacagaatgaaaagaaggaaaggggatatgttacaccaacgtaacactggttcaagaagaagcttatgtgaggcatgagaaatccagagtttcagatggtcatgcatggcaatgttgtccaaagccatgtaattgtgacagttttccaaccatcaaccactatatctacgttgctcttgcctctcaagctgcaataaaccacacaaccagctcactactggcagttcgccaaccctgtggactgtggagtttttattgactatgagggattcaagaaaaaaagttacccaatccagttccagtccaaaaaagtaaacaggaccaacttaatcaatttttaccttacattcaaatgcaaactcagaagatcaacaatgctgaagtacatgttgacagccactaggaaaaaaaagacttcaatgacaaaccatagaagcagagtctcaacgtcaatggggactggttgtaagcaaaaatacccgagacatccactacagtctacacaacaccaccaaacacagccctgcagtctgcagatggaccgagaagcacaccatactgactttgagaatataaataagtttcaattggcaaaagcatcgagaatattgcaaactttaccagtctaaaagaaatattgcaaactttacaacaaaggcagcaagtagcaacaataaacttgaccaaacacagcatatcaaggattttctcttccttttctaaaccgcaggaccaaacaatgatgcaactttccttggagggacactgaaccattacttgctgcattatcatgggtttccacagtgccgtgtgactgcatgagtgagcactgagcaaaagcccacaaaaaagagcggtcgagtgatctccctgtctcccagtccgagatgaccaccagatcagtttcaatgtcatgccaggtcagtcggcatccatgaagactgcactgcactgtgaggccagaagatcaccgtgcaatcactgagaaatcagcttaccactgagtaatcaccgccgcagagatgcattgtaaaacgtaggcctgatcggaatttccccgaacacctagcatgcacgcgtggggttgccggcaccaatgctcagatagcgcaaatcctacaccgagttccagactacaaaaaccctagaagaatcccctaccacagcaaactccctatcgcgacgagccgacgaccggcatcacccaccacgggatatgggaagatcaagcggacgatgcgttcggtgagctcagagaggacaaattaagacgatggcgcaggggaggaaagcgcgtacgtaccagcgcctccggggacccctcgtgcttgcccgagctctgccttcacgccggaaaatataaaaaaggatccgccgccgccgccgacgacgacgacgacgacgacgacgcaaccccgcggcgcgcgccggcaaccgtcgtcgtggccgtcgttgcgcgcgtaatgggctatttgggttgggcccatctcttgatacaaatagtgggccggccggcttgatgaaactgggccgtccatcaccgaacgaacagcccacagaaaccccaaaaaccgaaaatccagagtcgatcgagagcccaaatcgaagtccagatttggcgggaagggcaacgaccggttcccgcgctcctctcctcctcacctctcctttgatcctttccgaactctacgtaggcctttcctcctctgcctctcgtccatccaagagggggaagaacagtttcatcgtctcccgaagctagcagaggcacatattttcagaaaccaagaacacacacttcgcggagagtagtttggatcggatcgggatcgggatcggtgtgtcgaagatg

SEQ ID NO: 5970 - DNA, 952 bp, Oryza sativa
  misc_feature (81)..(81): w = adenine or thymine
  misc_feature (93)..(94): y = cytosine or thymine
  misc_feature (99)..(99): k = guanine or thymine
  misc_feature (154)..(154): k = guanine or thymine
  misc_feature (744)..(744): r = adenine or guanine
gctctagctttagtcccggtttggtaacaccaaccgggactaaagatcgatctttactcccggttatttcacccgggactwaagattgcgaayyttaaktcccgaattggtactcccggtttggaaaccgggactaaaggggggttacgaacckgggactacaaagggtttctccaccagtggtttctatacaaaagttgcttaaaaaaatcaaattaatccatttttgaaaaaaatagctaatacttaattaatcacgcgctaatggatcgctccgttttccatgctactgttccaagttgggaacaacccatagcgaacacagctttactctcatatgagttcttttctcctctttttcttgagaatttctgtctgaagaaatttgcttagtattagtagctcaatgtcattggagaatttgtttattttgaatagaggccaggcaataccaaggatcagcttgtggtacattgaatatatgttttttttagaatgtttcattgaatatatgttgagaacatgtttgttttgtattagaactgttacaatattttttttcataaacttggtcaaacataaacatatttaaataggaaaaaaatcaaagtgacttgtaatatgaaatggagggagcagaaaaatatttacggatttcgctaggatacccacaaatgtaagaaaagataaaaaaataaaggaaaatacaagtggtttacaatgaggtccttaccagattagtaraagcccaaatccatcaaaaattggcccaactacaataataccctgtgtgctaaagcccagcccactactatacaaaaggcctagcccatcaaggccttgctagccagtatccaccctcctccgcttgggccacctgtcagttgggtctcctctcctccgcatccgaatcccaccacaccatcggagaggagagagaagaggaagcaag

SEQ ID NO: 5971 - DNA, 1276 bp, Oryza sativa
  misc_feature (163)..(163): r = adenine or guanine
  misc_feature (165)..(165): r = adenine or guanine
  misc_feature (170)..(170): r = adenine or guanine
  misc_feature (172)..(172): r = adenine or guanine
  misc_feature (253)..(253): r = adenine or guanine
caggccatacagctctatcgcctcagccagccagcaagcaaagcgaaaccggattattattatttctctcccctttctaagctccaatttctactcaaacagtaggatcacctctgcagcttgcttaactaattatctctgatgcaaagctttcaacaaaaargraaaargraaaataatttctggtgcagctaacaccttatcagatacagggaaattaagcagacatctgataaaattgggacgataaacrggacatatacatgggattgacgaagccagattactgtgtatgagtagtcgttacacactgtcaaatccgtgcgctttgttagcatgctatgccagtgatggctgcagctagagctagagcagagctaagtagcagctaagcaccactccatgaggcgagctacgagggcctcacgaacagaaggcaccggcaaggccccttatctgccacgtcggacgggtgtgggccccacgaaaggacaccatggctccctatatagccttcttcagcaccctatccatcctccctgcctcctccttcgcacgtattacgtgcgaaaaaaaaaatcatcagcacaagatcgaggaggctttatctgaacaaggtacacacatccatctccattagcgtcttctattagatcttcaatgatcgtaggtgtatgagtaaattcagtttagccatatggttggattttgtatgtgcaagaagaaattgaaacttagactaagttcagagaaattttgctttgttattgtctagagctagcaacttgaattttcaaaacagagagccagtagccgcatgaattgatttcttctggataagcacgagttaatctgccaagtaggatcagagcacgcactaatagtcgtttctttaattaaaaaaaaggaagaaaggactaatggtttccttggataagtgaaactgtccaaattgataacgtcttctgcgttattagtgacaactagtactagcaagtactcctgcctttgtttttctttcgagatagtagtgtactgttatgtctaactaaagccatgtattaattatatgtttgctatgttatatagtcggataattagagcaaaacaattaacaaaccgtatatagtacaactaagatagtaagatgagattatcactagtcatttttcaaagaacactttcagaaggttatattaggcaggagtttttattgctgtgggacgaataattattttttgtttgggcctgatgggcctttgtgtgtgtgtgtgtg

SEQ ID NO: 5972 - DNA, 2000 bp, Oryza sativa
  misc_feature (840)..(840): r = adenine or guanine
  misc_feature (1000)..(1000): y = cytosine or thymine
  misc_feature (1016)..(1016): y = cytosine or thymine
  misc_feature (1021)..(1021): k = guanine or thymine
  misc_feature (1079)..(1079): y = cytosine or thymine
  misc_feature (1087)..(1087): w = adenine or thymine
  misc_feature (1093)..(1093): y = cytosine or thymine
  misc_feature (1114)..(1114): k = guanine or thymine
  misc_feature (1119)..(1119): m = adenine or cytosine
taatcatatgttctcgccctgagtccttgctttcaatctgtaactgcaggtggttgactccaacaaaactgcaggggcttccaagcaaacattatctgctgaagatatggaggatcaacttgaacagtttaccagcttgatgcaacagaagttcctgtccggtgaagactctgagcatatggactactctcggatcgataacgacgagatgctggatgaccattggtcaaaagaagccaactatgatgcggaggagaagtatttcgaagaggattagttcaaagttcaaactaggctgctgttatagcatcagttatgtagtgcatcatcgcatctcgttttttttttgttcatgttcagcacttacttagtctatcatgtacatatatctatatatgcagttgttgcccctctaatccgaataagttgagtaacttgcttatgaaaactaccgtatgtgttggaacatcaatcagaaaatagggtcctgtcttgtggagatgtttacaaattgcaaaatatttttatgcactacctccaggatgatggtgcatgcagggaaagtaacatgtgtgtattctatatttctaggggattacttgttcagtctgaaactgtgaaccgcatgagggaagtttccttcaaagcgaagaatgtatatatgggaaggcttagttagaagcagcgtgatccaaccagggtttgctttggttggacgaattggtcttcagacacttcaacgcaagctttagtattttttttttctcttttggttttgtattaagcccctgcctcgtgtgctgttctgatgcacgctttctttgtaccaaaaaaaatggrgacaaatgacttattcctgaagtttttgtgaaagcttttgccgtgtcttgcctgttccattgtttttcttttcttttgctgtgtttgtgctagtgtattgcctaccttcttctttttattaattttctttcttttgcattagtgccttgactaccttccycttttctttccttttyctttkgttatcggttaccacagtgtcttgcctgtttggtgcaagccgagaggcaaaaccaccycggttaawaaagtyttaagagaaagggactaccakggtcmccgtttttacgggccaaccggccaagaaaacttaaaagtttttgagaaaggacgatgtacatatacccctattaatgtgtatagtagatttctttcagaacatttaatccgtttgcagatagtgcaatttttattgttttgatatcccccattagatgaatatcttaaaacacatattctataacaattgaagaaaaaaaaggaaatacatttcttttttcaggaatagatagatattcaagaacaaattaaaaaagaaatacatttttcaggaatagatagacatttatgtaccagagggataaccaaactattccctctaaaaaagttagtttttactctgtcatttttctttaaaaaaatagctttgctcatttttaccctgcttcaaagaaaaaaaaacaattatagcatgcttgtactgtgaggagcagaggccaacgccgtcggtttgctgaatcagcaaaagccgaccaccgaccccacgttccgcacgcacgaaacgaaagtacgaaacccgcgccaacacaacccaaccaatcgtttaccgccacgtgcacgccaccccccaaccaaaacaaaaaccaaatttaaaaaatactacaatataaatactagtataataatttcttctcccataaagcttcgaccgaatccggctcgcctcctattaatccctctctctcctctccttttttcgatttgagaaaaaaaaaatttgctcgccttctccttccctcgcggcgaagacaccggagccaccactcgccgcccgcctatttcacgccgccgcgccgcgcagaccgacctcgtcctccaccccacccatctccgacgccgcggaccccggcggccgctcctcctttgctccattcatcgcc

SEQ ID NO: 5973 - DNA, 1998 bp, Oryza sativa
  misc_feature (1016)..(1016): n = any nucleotide
  misc_feature (1027)..(1027): n = any nucleotide
  misc_feature (1034)..(1034): n = any nucleotide
  misc_feature (1055)..(1055): n = any nucleotide
atctcacatttctcttctaatataacggtgtgtaaaagtgtgcaaaaaatatatcccatattgctcaaatgcattagtcagatttaaaccatgtgagatatctaagttttgaatgtctattacttttgaatcataaattgtatttttcatctatttgtatctttttttaataattaaatgttgactacccccgtgaaatctcatcgtatttctatttttttagtgtgacgtatatatacggtagtcataattttctatgatgaattacgtcacctatgattagtcgattacgtttgctatcaaataatacattaattattgattttttacacaaattggtagagaaattagttacatatggttgtatatccaatatcttttatagcaaagttttctctcttttccgatagaacttcaagagtcagatgtcataggtagcataaaacccaatctcaagtaggtaattttataaatggcataattaaattcgtcatgcaatgttaacggagagaacatagacaaatcgtacttttgaaatgtggcaggtattatttcataagtatacaactaagtttctcaaatgcaacctatgatacatgcatgcgcgcctagttatccttaaatgtgaagttgtagttttatttttttttcaagtcaaagatcacagttaccgtggcttaccgttcgtgcagtaacatgactttaccatgggatttgaaaattcttaatccaaactttcctaaagataaaattcgtatggtttttgacggtcactgcacaattatcacgtttaccgtcgtcttaccatcgaggagttgtaacctccccggtgatggtttgggaaaccttgctcataggcattatagccgtatacaagtttatttcctaactttattggaagataaatttgcataggcacatatacttcttcagtttcaaaattcgctttgatatgcccttattgaacatatgggatatatggaagttaaatacccttccattacctgggcagtgcnttgatttgtcngtttacncgttatggtaggtaattaacngaatacgttcggttggcaccgattaaataaactttcatgcaacaactccaaatatgatatcccacgtcacatccatatgctcgcatagcgtgcagtttatttaacgataggaaatatacaatatcaaggtgttaaaaataaaatggaaacaattcaattaactattgtcaggtactattagaccatatgacgtcgtgggagtaagctactaggttatagcacacgttctattaaaaatatatgttgcccaataacatcaaagataatttaagtaaaaaaaccatagtagagagaacatgaagtggtaaaaaaaccattgtcacgggttttggttagtcatatttgattactcgtaaatatttttactaaaataaaagtgattgagtttgaatgtaagcaacttctaacgatagtgcattctaaagtgctaatggacaatgaattatggccagaattgagttcacgacaatttcgaggttttgataaattgatttaaaacgctttataagaagtgtcaatgaaaaaaaagctttcgtaaaatcgtgctgtgataaattaggaagcttttcgaggcggaagcggataagttaaataaaaaagtcaataaattaatttaaagacgttttctaaagtaatgacacgaaaaaggattatataaaaaacgtgccgtgacaagtttagaaaacatgccgtgataaatttaaactagaaaggtagccacggagggagtactctccttcagccagataaaacgtgacgatatataaacggagtgagtagattaacttagttagctctcaccaagtgttatgttaaaaaaagaaaattaaatacaattacaactgtgaacttgacgagtgacacatttaatcaacggtgtgtacggtaacttgttacaatcataccgaaaacccctcatctagccacacggaatagcccacac

SEQ ID NO: 5974 - DNA, 733 bp, Oryza sativa
gcaggtcaatgaacgctgcacataaacaacaataaatgggtcgctgctgcgatcggaggtagacgtgacaaggagagccgcatcttccatatccaggagaagagaaaagatttgataaatcgaagaagaaaaaatttttggggaaaattttatcctggggacgcttggattgtgtgctggttgcctccgatggtcgcaagggccagaaatctcgtccacccaaaccgcggggagccctatcccctcagcaaaagccaagatgctgctgttcccgcccgccactaaaaatatttatgcacctcctcgcattaaaaattccatcgacgtcgcctcctctcctcctcctcctcgtcgctgcattccggtgagtccgtgcaatgcctgcattttgtgttttcgtgctcggtttcgtctcgtttttgctgatgacaatgttgtttgtttgatgcaggttgagtgagttggtgattatctgtagggggtgaaaatggcgcaggcggtggtgccggcgatgcagtgccaggtcggggccgtgcgggcgaggccggcggcggctgcggcggcggcgggggggagggtgtggggagtcaggaggaccgggcgcggcacgtcggggttcagggtgatggccgtgagcacggagaccaccggggtggtgacgcggatggagcagctgctcaacatggacaccacccctttcaccgacaagatcatcgccgagtacatctggtac

SEQ ID NO: 5975 - DNA, 2099 bp, Oryza sativa
  misc_feature (829)..(829): s = guanine or cytosine
  misc_feature (1819)..(1819): k = guanine or thymine
  misc_feature (1823)..(1823): r = adenine or guanine
gctagtatcgtcgtatggtgcaggaagctagcggccaaccaaagtgctagtgtactatactgttttgactgcttgcctcgacaaatctttctgaatgagcatgacaaatactgttacttttttttaagggcaagatgctagttaaacttcagtcttctcttcaggaaaacttcagagaatcttcatattagaagagcagtgatcagtgcatgcttgtggagaactaactggccatgtagggcagaaaaggtgcgtttattaagaactcatcactatgaattgttaatttcaagaacattcagaacttgtggtgtgctgggtatgtatatgagatccggaggttgagtggacagtgcaccttctcggtacaatgatactgaattcacggaataatgtggaaccgcaagtccgcaactctgcaagcttacaagtagaacttcttggcaagttgaaagttactagtacgtacagatttgcggtatagagccttgaagaaaccaaaaaaagcgaaagaaagaaaagaaaaagggagaaaagaagaagcgaaagcgaaagagagacgttgatcaggtccaggcgtccagcccagcaccgaaggctctccgcagctagatctgggcccatttgctacggcgaaaaaagacagggatgtgatcttgctagctttcgccaaagaaagctaccacgtgcattgctgcccattttactcgccgctttggacgctttcaccgtgcttctctgcaggctgcgatgattggctgcagcggtgcgatctgcctgcatgtataatctcgccttgaccagatcccaatcctccctgctgatgttsccggagcaagcgatccaaatctcctctcccaggcttttcccaaagaaaggtgaaaggatgcaaagcgaccgaccgccatgagcgacctcgcgactccttgctctctgatcaagaagttcgaagcctcaaaaagagaagaggaagggctcgtgggcttctggcgatgtcaacttggggtacgttacgttctattcctgacaagcgacaacggcatgatgggccggctgaacacactggcccggggcccatcagaagtattcacgatctgcgctggtgacgtggcaccggccggatttgcagctttgaataatttttttggaaagtggaaaaataaaagagggaaatcatcactccgcgtccagaccgcgtccggggtagtacggtaatctccggcctcctggaaaactgacacggagccggtccctcttttggaagtcatgggcaggttgactgtaccacatggcagcacgttcccgcaattcacaggccttgtccctcgacgttgcaccgtgtgaccaaaatgtcctcgcatgttgccctgtgtcctacttgctcggtgctcggtataatgatgccatccatgcacgtcatacatatatagaacttatacaagtccagataaaacataacaccgcggagaaaaaaaacgctagtaagagccaaatcatgatggattgatggggtgcacatgtatatacataccttcagacggaaagaagatattcatgcactacaaatgttacaaaatcacatcctaacatagtaccaacgacgctgacaacaccaccgcgcgagccagcgacggactcgcgcgcgtcgtcgtggactcgtggcgcccatgtcgcgtcgcggtcggtgaccgctttgcccgtcgcacgttgcgagcatcgcaacgcgtcctccactccagcctgtgccaacgagacgagggacgttaggaaagtacagccgcgcatatcttggttgattgatcaggaggagacgggggaktgaragggagagagaggaattgaagggggggtagtttggggaattcgcgggggcgcgacgttaacgggaggcgtggacggcggaacgggccggtcggggaacgggcgggcgggtataaaggccggcgaaatttcccggacgcgaggccacagatcgctcccagccattctctccgcgacggtctcgtcttccccacccctcgcctcctcgcgcgctcggtgagagaagcgaagaagaagaagaagaggaggaggaagaacgccaggctaagcccagcggc

SEQ ID NO: 5976 - DNA, 1998 bp, Oryza sativa
  misc_feature (321)..(321): n = any nucleotide
  misc_feature (329)..(330): n = any nucleotide
  misc_feature (345)..(345): n = any nucleotide
  misc_feature (349)..(349): n = any nucleotide
  misc_feature (370)..(370): n = any nucleotide
  misc_feature (444)..(444): n = any nucleotide
  misc_feature (449)..(449): n = any nucleotide
  misc_feature (451)..(452): n = any nucleotide
  misc_feature (461)..(461): n = any nucleotide
  misc_feature (466)..(466): n = any nucleotide
  misc_feature (494)..(494): n = any nucleotide
  misc_feature (496)..(496): n = any nucleotide
  misc_feature (509)..(509): n = any nucleotide
  misc_feature (515)..(515): n = any nucleotide
  misc_feature (517)..(517): s = guanine or cytosine
  misc_feature (526)..(526): n = any nucleotide
  misc_feature (528)..(528): n = any nucleotide
cacgcggaccgaccgcggattggcccgatccagcagttaccacccaaatcccgtgcgttctcccgtgcgaaaagcacttgcgcggtacacttgtcggccgctgcacccggccagatgccccttcggtcccggccccggcggtagcagtcgttggactggacggatgcgttatcaatgtggacggcagcgggacgagcgtgcgacctgctcggtgccggtgcgtgagggcgcttcatcaatgtggcaaaaacggagaaatcaacgatatcaccgacgtagccgtccggccgaggccacgtgtgctgccccggtttcgcgacncgtggccnncctccgacgcatgcncggntgtaaataatgggaacgtccntcgcgccgctttccggccggcgctgcgtgagttgatgacgacggcgtcggggtggccgagcacggtggacgcgnacgcnannatggccacnaaggntcgccgcgcgcacgggatccgagccccnantcacccagtgatncgtggncscgggggccncnactgaacagcgtggttccgctggccgggatccaatgcggccgcgctcggggccctgggcccgcatgtcactagccggcagctctgcacctcgccgtgtcgccgtcacgtatagctcatggggttccttaccgaatctatttttatagtctcgcttgcagcatgcaccatctgatatcagccgcacgatctggatatggacgttgcttgttttgtttacctgtccttaaaaatttaggatttgcacaattgcactccatggacagtttgtaacatgggaagaaactatcaacaaaacaaaagggttcaaattctatccaccgatttacttgtatatacgactaattattttttaatgataggtgacatacacatctatagcgagacgtttatggtagtaactttatcaatatcaaaatatgttgatctagtctatcgaatgtattcataaagatagaatgtctattcatataaactaatgtgcgcttgttgtgtttataatatatttaataaacaaaaggattcatatgagaatttgaaatagaattgtttttggtgtacaattgtatcgcccaatctacacatgatgcattatattttttcccctccatacaatatagcagcctcatcggttgctcacatttttaataagccattttgatattttttaatttatagaaaacaaattatatatgtgttcttgatacttaaaagtcaatgtaaaaaaactaattgaaaatatcctaaaatcaacttaaaaattaagtttaaaaatttaatttttggtttttattttggtttattaggtaaccgatggggctataggtttttaacccactagtaaataacagatatgtaaaagcttcaaactttttcatagcttatcagttgtactaagctgaaatgatcaaagctgcctcttttatattaaaaaaatgtacggtctacctaattaatttgtagcacaagaaaactgaacatatctttttcgttgtcgatggatggtctgcctaatttcaatttgtctcccaaactacctcaccttctgcaaggtactcttccggagtccagtagtggaggttttacggctaatcctggctataaaacctcccgagaaccgtcgaagcttgaacccccgttccccaattcggcagaatacgagacctttttctcaggaacacgctgtcacctcacctccacgctcccctcccgcggcagctgaacagagacgagctcaccccacagtcccccactacccccacccaccaccacctccagcttttgtcctgacaccagctaacagttaaaccggttgctgttattagtacgcgccaccacgacgcccacgcacatcatccctccgcgcaaaagcctatcaacagctaagccaaacagggtcaggagccggagccgtccgggagagggaacactcgagcgatccgtccgtccgcccgcccgtcgtcgtcgcgcgc

SEQ ID NO: 5977 - DNA, 1959 bp, Oryza sativa
  misc_feature (1778)..(1778): r = adenine or guanine
caagggggttacctgtccacttcacttcaccataagctgcaaaatgcaatggctgcaattgcatcactacgtcttacaaacgtacttattgcgttctgaaataattggcacttatactattcaagtttattttttcttttttctataaaatttataaatgttgaaaatatgttattctatcaaagtgtgtaatatcataaattcaacacggctgtaatcaacggtgtcggttattcgatattggagggggtattcttgtagttttttttttagataatgagttcgcaaacatgcattgcttgagatggagataatcatgagatggtgaattggtgatgactgatgactggtgatttgggtttatgttttcttaaaagaaaaattggataaccacctcagccacttcaactgctagctaagctagacaatagacagatgtagagatggatagatgtgtagccatagatagcttcttaaagctccaacacacttatacctgcaacaagaaaagagcacaaattacttgcaagtgagctaaagtccggtagctagctagctagataccaacacacacatttgctgccgtagcttactagattatggtggtgttcaacgagattagtgtggtgttggttgggaactacctttctcaggattagagagccatcatttttgttctgtgattccaggtcagtgagcagttaagcattaattgaaaaaaaaagaagagttggacattgacagtttgacacattgttgttattattatctaatgactcctgcagaaatagagcacactgcacccattccggaaaatctcatggtacctttgtcattaatcatgctgagcacagcacacatggctgcactgattgccctgtgaaaattcctactcctggctactacccctgctcctgatccaatcaagacgatgattaaatcagatcaaagtttgtgcttttccagcaaaaacacagctactgcaaagatagatttcaaagccatttatctgaaaagttgcaaagaaaaaggggtacaagtgccatgaactagttcatgatgggccagcagcagtggatatcatgagaaatagatggcgctctcaaaattgcaaatcaatcaagtgccatttttaagcaacacgtcaaactgtgcaatgagtaatctgcaggccaaacaagctcatttgctctagatgaactcccaatgcaaattaccaacacaacaacaggcaaacacaaatttcagaatccaagattattccactaatccataaaataatgcaccactgaacctcacattttgcaaagaatttagtactcactaattctagtatattaaaactcctaattaagttatcctgactccattggaaagagtgaaaagcacatcaaaaacctcagcgaacaaaaagaaacaaaaggcaaacgcatcattttagtggagccccaccttcacgggctcgctggccggttcacccacatcctcagccgtccatcacccccacgtcggacggccagatctcccgccacgtttcacccccgccgagacgtgcgtgtctcttacaggtgggtcccacgtaagttttccctccacgaagtgccctaaaaaaatatataaccccagcgaaaaattttcgcgctcacgcacgcacacacgcggcgcacatgggccgcattgattgcggcacggcccgggctgacccacacgcccactgacgtgacggccccacctagaggtggccccacacgtcatactcttggagcgggtttgggtaragctccacgtcgcggtgggctttactccaaaccccccgcctctaaaaggaggaggagtttagtagtaacctctttcttcttccatccatcgccgccgccgccgccgccgcattcgccgccgtcgagtcgtcgtcgtcgccggtcaccgccgccattggcgagaagcggagaaggggaaggg

SEQ ID NO: 5978 - DNA, 1946 bp, Oryza sativa
  misc_feature (380)..(380): k = guanine or thymine
  misc_feature (382)..(382): w = adenine or thymine
  misc_feature (394)..(394): k = guanine or thymine
  misc_feature (423)..(423): r = adenine or guanine
  misc_feature (427)..(427): k = guanine or thymine
  misc_feature (475)..(475): r = adenine or guanine
  misc_feature (506)..(506): k = guanine or thymine
  misc_feature (527)..(527): w = adenine or thymine
  misc_feature (584)..(584): r = adenine or guanine
tggttctatagggagcccctttacctgtttttagagatttttgctgttaaatgatgcctatggcgacaaaattcttatttttctcttatgttactagagaattttttttcatgttccgaataacaaagctgaaattgagatttcctagctacagcaattacatgtccagctacatcattctgaatataaatctgacctggaaggatgcgttaatgtgttactgtctgtcatataacttatctgtaactttttctacttcatttccatctgcagttgtgtaaagaaaactacaaatacaatctccatgttaagtagccttgtgttctctaaggagaaaatataatttttcttatgctgtactttatacactaatcttctgkawtttagctgcttktgaggctgaaatttgatatgcaatttcgrtaakcaaatcttcggtgaatgaagaaagtaaggtttttatgatggatcaaarggatactgacatggtagattctcctgaggtktctgctactgataataaaacwttgcctgactgggcaaaatcactggagcctgtgagaaaattaccaacaaatgtgggracacgaattagaaaatgcgtttatgaatctttggagagaaaacctccggaatgggcaaggaaaattttggagcattcaatcagtaaagaggtctacaagggtaatgcatctggaccaactaaggttagtgtgctcccctgcaactatggctcaatcttctgcaaaataatgattttcacatactgctttatgttaagagtatttaaagcatggtctcatattagtttaggtttattaccatgtgtttttctgcttatattaggacttgggagtcctcatgtaccctatatgtttggctcttgccaagttggcatacaacattaattcatctgttgagttcctgtcatacatcatgtaatacatattgcatgatagttccgtatctccccaatagtttgtgcttttactatgtctattgtattccctaaaaaagatgtgatgaaaaaagggagccccatgagaacaatcactgtgacctttgattttgatgagaggctttggtggtccaatgagttttttatgtttatctagttggttagtcaaggtttaatagctcttgtagctgtaggtcatacgttttaactttcttaatttcagctcacatgccttccctcatgactgtgtcggattttctgctgatgtgatgatgcttgatgcttccatggcttagtttagctggaaaaatgttgacattagctctgtgttgaaattgcatttctactaatatgctccctccgtctcacaatattgctacttctccgcctacctctcaaccaatcacaaccttttcccattaattttttacctactttctcatctcaacttatcacaaccattcctcacccctaccttaatctcataaaaaaaaagggcataagtagttgtattttgagatggagggagtagtgtatatgccaaaaagtgatctaatggcaaggccatgcttaaacatcattcaaaagaaatggatctggcattagattaaatttgatgtccatgctgatattttgtgtttcttttgttcttaagaagttcctatccctatgcctaaaatattgtttggttgcatacctttttttttggttacagaaagcagttcgatctgtgttgacagaagcatgtcgtgtaaaagtaccacataatccagaaaagccaagaaaagagagaaatgctatttccatctcagaggctatcttgaagaagtgccgtattgccctgcgctctgctatttcctcagatgaatccaaacttttggggaatttgctcggaactactctagtgaattccaatgaaaatgaggatgaaggcatactaggattccctgggtatggtgtccgccctttggactccgcacaattgata

SEQ ID NO: 5979 - DNA, 1908 bp, Oryza sativa
  misc_feature (64)..(64): r = adenine or guanine
  misc_feature (1370)..(1370): y = cytosine or thymine
  misc_feature (1371)..(1371): k = guanine or thymine
  misc_feature (1372)..(1372): w = adenine or thymine
  misc_feature (1379)..(1379): y = cytosine or thymine
agacaaggggaataatggcgagaggaaggaagcaaatctcttcctcggcgactttatacccttrccaacgctgtgcccggctcctcgtttctcgcgcccactatcttgccccctcgtttctcgcgcccacgcttccactaatcccattcgcccgtttgcggtgcatgaggtggatatgcggctgtggcagtcgagatggaacatctcgtgcgcgcgttaattacgctcgccgaccgaagcgccatcaccatatctccaggaaaaacgaaccggcttgtcccgatttttagaccggccccacctgtcaccaggccttaggaagtggcgtcacgcccgaccgcttccctcgaggagggcgatcgccctggcataacgccgggggctactgtcggtgacatgggaccgggagtatcatgacttagagacttgaggcagacacgatcacccacgtggcctaaccccctcgggggggggtcgggcccgagggtgatacggccgcccttctctttgtctccccgaggggtcggaccgctcccgtctcggccccgagggccgaggcgccccgaccccttgtgggttttgcgccgcgtatatggggtaggtgagcatagcagggctcacctaaccacatttattgcggtttggacgagcgcgtcacgccgcatgtaacgcagtgcagcgcgctcgtttatccggtctgtgaccagtcacagaccgatcagatcgtgggttaggtggcgacaggcggtctgacgcacgcctcgccccatcccatcaggatgagagcctccaagcactcgtccctagccggagccggcgtgttagctcctggagatggcacgttggtcccggtcagatatataccaggcttcatcctaaccattacaagcaagacattgtatgaagaggggcgaacatgcagattgataaactgacgcgtggtggacaagaatgaccgatttgtgaccggtctgacactggtcatgtcgtcagcagacaaccatgttcccacgtcgcgcctgcttccggcggaagtggaggtaggtatgggccgtcccatcagaaggtcattcggacgacaaccatacaagtctccgtctgtttatgaaaagagaggataagtccccacaaaaaaaaaagagagagatggtgcatgtggtatccccttgaggtataaaaggaggaccttgcccacttagaagggggattgattttttcggatacagaacgatcagagagggagagagtaagagctctctggttctccagctcttttgtagcttcttcatacatagatccaccaaaacacaggagtagggtattacgcttctcagcggcccgaacctgtatacatcgcccgtgtcttgtgykwtttccaytctcgcgaaccttccacacacagactaggagcttagaatctcacccagggcccccggccgaaccggcaaaggggagcctgcgtggtctcccgatgaggagccccacgctccgtcagatgtgatagaaaagttgtgtctatataaaaggcttggtgtgatggaaagttggaagtttggaaaaaaactttggaactaaacaaggccttattcttcaaacttccaacttttccattacatcaaaacttccatacacacataaacttctaaatttttcttcacattattccaatttcaaccaaacttacaattttgacacgatcaacccaaactatgaaccgcgcactttacttaaagtaaaaagaaaaaaactgtgcgctctccaactaccgcagcaacgtgtcgagcacaggaacacgtgtcacttcagttcttccaattgctggggcccaccactgtttacttctgtacaggcaggtggccatgctgatgacactccacactcctcgactttcgtagcagcaagccacgc

SEQ ID NO: 5980 - DNA, 2000 bp, Oryza sativa
ttttgatctgttgccatgcatcttcatggagttcagtgatgaaacttgacagtattgcttttcgtctagttatgtagaatcagcctatgagaatactaggatgtagcttcaaggcatgttttggttgattttctggggaattttaccctaattaattcctgcaaaaatttctattccaaacgtgcacttggcttccggtcacaataaccccacttatgtttttttccccctaatatatcttaaccaagagttcctgtcacgtcaaaatattttacaatatagtctaaaataaattaaaaatatttttttctataaaatgtgttacacatccttttttctttttgccttaatttgatgattttatatgttttcatatttgatttgattgtttttaatattaagaaatctataagaagtacaaatgtttcttttatatggcctagcaccgaatattcccaaatttccaatttccatcagcttccatagcggattggaataagttcgtttgttgttcctcatctttacatcgagtttatttggcatccctaaattgcaatactatactcttcactcttttatctttgcaagaccgttcaagtcaagttctaagataatatagatgtctgttttggctgatgtggcctcacatgtaagttgactcctcacctcttccctctcttccccatctctcttcctctcccctctcttccctcgcagcttgccggcggagagagggctggcagccgacgagcccatctgcatgaggtaccagtggaccacctcccacgaaccaccagtgcccgctcttctcctccgccatcacctgcatgtccagcatgcttaggtcgttcagcgtcgccacggtgtcgatcttgccatcttgggcaggcatgacatgctttgtgagtgcgccatggcggtggaggcctcccatcaccgccctgctcgtgtgccccatccttcatggtcgagggcttgccacgccgaggtaccaatcttcgtcgccgatagaggcatggggtttgttcagattgatgtcatttcaaaccatacaatttttttttgatagagttgttagatatgtgcatccatttagtttcttgtcaaactttggtaaatacacaagaaaacctacaaaaaatttgacaatattgccaaattaccaaaaattgataaggtttattttggctacaatctaaacaaccccatcgagccaaaggcaccggggcacgttgcgtggtgggtgatcgtccagaacttgagcggtcactcctccaacctcatgatgtagaacctgcaaagtagaggagagaggagatcaaaggaagtaggaatatttcgccaaatcaagtactagaattagagatgcagagggcatatactactcccttgacgttgttgatttttaatcaacgttgatcattcgtcttattcaatatttttaagaaaatataaaaatatttaagtcatccttaaagaatattcaatgataaatcaactcacaataaaataagtaataattacattttctttaataagacgaatggtcaaatgtatctcaaaaggtcaatggtatcatacataacctatgaaaaccttagaatcattttttttctgactacgatgcctcctgctgccttatgatctggtttgaatggttttgcaaaaatcatttattgtactgcagtttaggaatgccaactgaaaatcgacgtaaagctgagggacagcaagtggacttattcctagcggatcacagattattgaaggcccgtgacttccccgagaaaaggcccagcagcaacttagtcaagggccactacggcctcgccggcttctaggttcgtgtagatgcttctagaaccacaggatcccttaaatactctccctcctcttccatctcgcgtcctcttggaaacccctccaaaccctagccgcctctcgtttcttctcgtcctctccacgcccccgagatctcaggagcacaggaggaggaagcc

SEQ ID NO: 5981 - DNA, 1949 bp, Oryza sativa
tttatctcggcgggtacaccatctcttcattccgtattccttgtcgagatctagcaaccgttctcgagcgattgagaaggcgtagagtctacgacggagctttgtcaacatttgtcgtactcgccttagtcgatcttggtgtagaaccatagagacatgaagttttcgacaatgtcgaatagaattttcttgaaatcaatactcagaaaagaatattagatagaaatagccctcgagcgaatgctcaaagggtgacatgttataatatgacagactagtgaattgaatgtacagaccagtgttttgtatatgagcgtcttctctcttaccgactccgatcagtcagtttgtagagttatacactctccctagctcccagccttatcgtcggagaatcgttctcggatgacagggctcttggacctttgacctgccttggttgaacaagcactgatcctagcccccagccgtgaagttagaaaactcaatttccgattacacggcttggttaatacgcacggcgagaactcttacacgaccagatcttacatggtctttcgtctctgaaggatccgacaaggccttattggctctgggcgtccccagccgaagttccctcaggttcctcggaggccttgtcaagacggcgtaaagggacagtaggataggtttcaacgctaggtgtcttttgtggtaagggatctctgggtaaaacacttggcaatcttgtgcacctgatatcaactttgttgaagcaggggtaatgggagaatcgctacatcgctggtcgaggaccaggcagtagtcgtaactcgaccacttaaagtggaagtagtgggagaaacgccacatcgctggtcgaggaccagacagtagtcgtgactcgaccacttaaagtgaggcgagagagatcactacgttttactggttcgggaaccagaagtaggagtcttttaatcacctataggggcgctaaagttagtttattacatgtgcatatcatgtggccagcatgactcacatacctaacttatagcatatccggatgtccgctcgcaatcatgtcgggtgatcaaaccgacggcgtttacgaggaattatccgttaacaaccttttctcgagtagtccagctatggccggtgctatgagataggtcgtcggtcttcgttggtaagttgggtgcgacgactccgcatttgtcgagaatgttctcgatagtggggtgtactcgaccacaacctactcgagtgctcaaatgtttctgaaaaatattttctagaaggcaagacatatagcagagaatatcgagtatgtactcaaaaactgcatggatcttctagtattattaggatataacgagcagatgtaaatatcaggtattatgtaaaccgtaaacaagcatgacttatacagaagaagacagagcgagcccccagcgttagatcgtagtcgatttaacatcggggacacccgcacaacaggtattattgtataaaaagcatgctctgggtaaacataataaattatggatctgacaatactgtatgatctgaataggtacgataaattgcagataaaatattgcgtacctttatagatacatgccggatgtatctacgaaattagtagatcaatttaaaaaaccaatctaccaattaccttgctgcgtactcgttcgatatcaggcaatctgacatcttttgttacgccgcggagcttgaggcttggatgatctcgatagaccaagttgtcgatgacgatgatggttccgatctagtcggaagatgtacttggacaggttggatctccccacagccgaagtcgtcgagtagcttgttgtcggagagtccatctcttaaacccatctcgtcgaaatcctgaagcaccaaaatccccctacctggcgcgccactgtcgacatttgatgtcgcaattctggtatttgcat

SEQ ID NO: 5982 - DNA, 1949 bp, Oryza sativa
  misc_feature (942)..(942): r = adenine or guanine
  misc_feature (972)..(972): w = adenine or thymine
acgatagaccattggggctcctttcttttttgtttcttttttttggacggattttttttcttgatgaatctttttctttctccacaaagccgagcgtgggaatctgaagatggtttggcaaaatgatcatgtcttggcgtcgttttttccctcaaataatatagacttatttgctaagggaaaggcaccacgtggcccgatcaaagcttgcaagcaatgttggcattagaatataagataggtgcaccagttgacgcgtctgctactggtggttttataaaccgtgaaatatccattttatgtgaacctgtagtatttgtttctttctatgctacaaactcaatcaattgccaagtaatatatcttgattgttaatttcaggtattataccatccatcattacctatctggctatcttatgtatctctatcgtcaaagtgaaccgaataaagttggtcggttaaattctaagctactgaaaaaacaaatttatcatgtaggcatgtcaaacaatcaactggcaaatgtttttcctcatttactgattaggacacacactgaacatgtcacgaaggtcacataggagatactcttatcttgcagtcacaagagttatatggtctcaaccccgatatcccgtatttaatctccaacacgcttataatcccttcaaatcttatgtttttttttacagaaggcaccatgctttgaaattaggtcgggaggacttcaaatggaattcttaaatactattatattgtgatataagtgaatttgctgcttcttattggtagagtgggaaatccatatgcatttcagaagaaggctaagcgtgtgatgatagggaatcaacagttgaaagcttgcttatttatgttcagaaatttcacatgcttctccttccctgatgtataaaattactgctatagccaagccaaaaargaaaaaaagccttgcgcagtcaaaattttwattggggcttacgggcatgtatggctgcttgcagccttggaccattgggctacacgccgagaccaaggagcagatgccgcgaaaattatggcacgtggctaaccttgaaatttcacgcgcaaggtttacatcctcgaaccgcgccgcgccacgtggcaggggccgttcaccttttgttatacactaaactgcagtgtggcggtagggtctagccattttgctcttgttagtttgtggagtattgcactagtgttataagattgtctcttctagataatgattattgtaagaatggtacagcttaagacttttgctccacaagggctttgcccttttgattgaagaaaatatcacccacagtatcccagccaaaagaagttacaacacaaattcccgatcacatgaatgttaaagcaatacaaataatcagaccgaactatttatatgtatatatattgaaattaaactggaaaccaatgaaagaatccaataaatcctacaactattcacatacataacttcaaaggcatttaatgagtgtatctctagtcataaattttcacatctatctcaagtcaatcaaagaaccaaaataatatacataggcataatgttcagatcagaattaaattcccaagatacacaacaaatcaacctatatcagtctatatctactcataaatgtgcagaaataaattcgaaagatatacacaaatcatatccattaattattgaagataaatatgttggtaaagaactataaataggacaagaaccaagttcatcagacacaaagcttccccttgcatacaacctttgacacattcgtcatggatatgcacactctcctattgtctttcctctttgtttccatccttcatattcacacaactagttccaccggtactgaaaatttcgatgcatctaggctagacacatatatagtgcgtgtgcgtccaccaccaaacttctcaatt

SEQ ID NO: 5983 - DNA, 1994 bp, Oryza sativa
  misc_feature (462)..(462): m = adenine or cytosine
  misc_feature (1071)..(1071): y = cytosine or thymine
  misc_feature (1081)..(1081): y = cytosine or thymine
  misc_feature (1083)..(1083): y = cytosine or thymine
  misc_feature (1089)..(1089): k = guanine or thymine
  misc_feature (1094)..(1094): m = adenine or cytosine
  misc_feature (1100)..(1100): r = adenine or guanine
  misc_feature (1101)..(1101): m = adenine or cytosine
  misc_feature (1104)..(1105): w = adenine or thymine
  misc_feature (1109)..(1110): k = guanine or thymine
  misc_feature (1112)..(1112): r = adenine or guanine
  misc_feature (1113)..(1113): w = adenine or thymine
  misc_feature (1116)..(1116): r = adenine or guanine
caatgtgttgtaccgttgttaagtggagactaatcttttcttaattaatcaaatattttactatttttaactacaaatatttacaattgtctttatccaaaagagtagatcatgatacaaaagactactatctttgtttccccttgcacaattacatcattggtgttgcttgctgagtacagtggttggtacttagccttgcctaattttctattctcaaatttttagtgcctctgtgatgaagacggagttaaaatatcaagcgttgtaccctagttgagtactcctgtggactgaagctaaacacccactaggatagtccttttccgccgttgcattcttttcggtatgaggactaattgtcacttttgtaaatatttatgctttatttatgtttggatatgtacaataacatgtcatttgatgtaccttgtgttgattcctaaacaaggatttaatacmcaaattggtctgaaaaaaggaaaaatttctgggtgtgaatcaccacacggcacaacagctcccactcaaaaaatgacacggcaacatagagcctacaccgcttctccaaccacatgaaaccatgctgccatagcataagtaggtggttattgttgctgagcttgccacctagttaggcagttgtgactctgcccatgcgaatgctccgcaactcggtggaaacatccagcactgccacctacatgcacggatcctcttctgctgcaagcaccaagaaagtattttcaatgccgaaggtcgcccatgctatgccgagaagacaccaaattggccaaactaccaagaacatgtgaatcccattgtttttttgtctagtgctctagtcttctagcaaagaccttatcaaaggtgtttgaagagtcaagggggataaagagaagtttgctcctatggcaacaaacggatcaatcagctatacataccgcctccatctctttcaataggaagtaccgcagggcttcaagaatcatgaccgacctcttacattggctacatactctgacactgatggtttgtgtttcgtgcaacggctctggctatatcctcatytccagcctcytygtgatkttgcmagctgrmgtwwatckkgrwtartgcgcaaacactggacgaacatctatgttcgtttccgatgcatcctaaccctaacacgtaatggtgaggtagttgtccatcaacataacttagattagcctatcgtgcagaagctgaatcagatgagcatgagacgaagaggcaaggtcttttgggggactattatacaattgtggtaggatatatatataattcgtatgctagcagagcaggggtattacgatgcaattcagttcctaagagaagggtgaaataggacaaaacaatggagaaattgaaggcagtggtatgttcttgaaccatggagaaattcgacggtaataaagtgaggagtgaagccaaaaatgttgggtggtataaactaaacttcctgtattttgatggtattaattgaacgattcttttttcctttccaatgaactaactaacctgacttgcaagcaacaaccactttgtaccttttcggaactttttttttctaacacgatatcaaatgagtctctacaatcataaatgtgaaagtatcaaattatcctatgtgtaaaccagaagcaaaaacatccatcggcttttccaaattctgtttcttcaaagctcacaaaactccacaatatccagtgagctcgatctgtgtcaccagtgcgagccagagaaaaagaaatgtaacttttagataaaagatcatcacaatccacctttaatctatcagaatgcttgcaagaaaaccaaggtaatcaataaaaatggtacaagtgatcgatcgagagtttgtcttcacgtcctttctcatacttcaaatacgttgcactcccaatcccaagtgatcaagaacaaaattaaattttctaaattacaagcaaatcaaagctcatcgaagt

SEQ ID NO: 5984 - DNA, 1970 bp, Oryza sativa
ttttcgcttcttggcatcctttcacatgatagcaatatcagctgtttataacaagttaggtaccctaggaagttgtagagatgtaatgccatctccctagaaaacttatttttatttttgcccttctgcaggctactccaggggatccagttgtggacaagtatatatccatggggcttggacgtgaagctgtctcatttgctgtgttgaactatggagataatccagcgaaggcatgctttttcccttatttatcttgtgatttatcattaccttctttcaacatatcatcaagaacaaaaaccattgctttgataactcaaaaaggttttcaaaggtcaacaagatagctatatacaatcagtatttgcagaagcactagggtttcttcttctagcaaaacagtgattgccattctgtccagttggtagtttttgtggaattcgattttctacttctcagggagatagaagtgtcttctgccattctaatcgccacgagcatttgtagacagtggaaaaaaaagagagagaaactgacaaggatgaatcctatgtacttgcaggtgaaggagtttgtgaaatcctacaacgctctccacgagatgggcttcacatcctcaaatgttcccgaactgctggccatccacgacaacgaccctgacaaagttatccagcacctgatcggcacatcatagtccagaacaaaactctccacatattcccccatgtataggtccatcttacgctggcaagcgccatacatgtcgcgtttttaatgatggtttcgagtgctagctattgtacgcgtatttccgctacgagtttcatgaactgactattgttgtgcttcccaagcggtttcataaacttaaccttgctttttgtgtcggatatatagagccagtaggtgatgattctgattgctgaaactttggttgctatacgtttgctactcctttttggtcgattcagcaatttcttcccgccgttgttcagtaagctccgaacgctgtgtgctgcacagcagcagccagattcctgtggcaatttgctggctggagctcactactggatagttcatgtccgtggatgacggttggttgtcacttgacatggtggcaaaatcactcgttcaataacgtgacgaacaacttccagatggtaagtaaacacgctaacaattactacctcagtcccaaaataaatgcagccatagttttccacgcccaactttaaccgttcatcttatttaaattttttttaaaaataatttaaaacataagtcataagtaaaatactgttcatattttatcatctcagaacaacaaaaatgctaattataaaaaaaattcaaataagacgaatgatcaaaattgagtgcgaaaactcatgactacacttatttttggacggaggtagtgcacctttttgcatgcctaaagcactggtttgggcatactccgtatgaaacaagcatatgtactgtggtgctgcagacaagtccagaatatgtgtcggccggtgactgttccatccacacactaagggcctaaatgtcattgaagaacttatcgtttgatctagaatcgaggatcactgttcaccacgctatcttttttctgctgaggatgagctttgcatcactggacagcaacaacgagcatgaacaagaacaaacaccacaatccatccccatctccttctctcccccataacgaaatcgttgcaatgctgtctcaatttctctcattaaaagaaaacaaaatcgttgcaatgccgtctcaatttctctcagaaaaagggaaaaaagaaaagaaaagaaaaaagaaaattacatttccagcccaacaccacgatctcccatctccttcctctctcccgctataaaacgacggcatgtcgcgccgtctcccgcctatcgccgatcgaagcttacgagctatctgctcttctctctctctccgccat

SEQ ID NO: 5985 - DNA, 1996 bp, Oryza sativa
  misc_feature (534)..(534): w = adenine or thymine
cgatgccggcatttgccaattgccgtggagaccttgttaaaggaaattgtaagcagagagatgcgatgggaaggcatattgctgaccctctgcctggagaattaggaggctggtgtgtgataaataaagcgtccgactagttccggcatgtgtttctagaaagattctgtgctgttcgtgttgccattttactctgaccaggcaaatcgttcgtctgttggttgttgtatgtatcccggccattgtggtcgccggcggtgtgcattggcatttcaggtgattttgtacatatgcttcttcttccttagagttggttgatgatgattctcgtctgaacaatgaataggaagtgtagcaagatccttgcgatgcatggggggtgctagcttatgattcttgttgggtacatttcatatgtagaaaatttcacaaattcaataggaacattgtgatatactagtgaagagccttttcactggttgagtaaatttttaacctactgatatatgtatatgaaacatactactagttttwatttatttatttttgtctgaatagtgttcagtcggtttcctttcaatttcttatcttacgcacacatgccgaactcgggttgctatctggcccgtcccaagacgagttctgatcggatccggcccagctcagccaatgccaagctgcagatgatgaacaagaagcatatggccttatcttatcttttcgtttatatttatacttatcagacaaaatttaaaattttaacactagatttaaaactaattttcaggtttttctcattaaaatttgtttttcaatctttgcttttaggtcgttaagaacacgtatataaaaattttattcacaaattacttctcatttacgaatatgccgtttggccaaacaataggcatctgaaggtgcaggtgacgggagcgaacaagttccagggcctccttccattctgctcaagcagcagcagggggaggaagaagtagttaccagcagtttattaattaggccaagtggacaagatcgatggcgcagaaaacgtaccctttccacaactgtataatctagattaaattttacaaaaactacatgtattttacattatttataacaaaactataaatttaaaagcttgtttttttcgctgggatggtgaagaatgccgacccgatgtatattaaggaaaagggaaaaactgtacaaacctcctcgggaggaggcacaaatgtagtgcatcaaaagcaccgcctttacaacattaagcaagtttcaaaggctataatctctctaaagctggtgctgcggcaacactcaatgagctaactagccctgctaattttcaagtttcccattcatcacacatgatcgcacacagttgtgtgaccgacgagcttgttttataaaattacaaattcagcgtctccgtttatcacgaaactagacatacttcgtgcaatatatccatcaacacagataatctctatatcggtaatcactaattagtgagcagatcatccatcaacatagataagatctacaattaattcgttacgaatgaccggtttcgtagtggtggtggagagggaggccgccgaccaaaccaaggtcctgcggccgggaaaacgatgtggcttttagtagcaggagtcggcagaaagcatgttggtcggagaagaacatatgccgtacgttttgtacaggtggtgcatccagaagaatctcgatcgcaactagcggggacgtgtgtccagtcctggtgttccgatcgatcgacgtggtgtacatgcatcgcgtccacgtaacagccattcatgcatgatgatcgtctttgtccatcgaccaaagtcgtccaagtgcagcatatatataatcggatgcaactcgagcaaccttacttcccatcatacgcactgcaagcttagcttggtgaggatcgatcgatcggagaagatcatcagattgataattaaagtaagaaaggtcgagg

SEQ ID NO: 5986 - DNA, 1927 bp, Oryza sativa
  misc_feature (1730)..(1730): r = adenine or guanine
  misc_feature (1775)..(1775): k = guanine or thymine
agggaagaagcatctcttggtcatcaatttaatgatgaacctccagctgattgtataaaagcatgttccccacttcagtcaatggtggacacaaatgaggaaatgctgctggctcatgaggtaatgaatcataccaaaaatataaagccatatcatgttgatgactctctaagaaataacaatgatatttcatttcatccatttaaggtaagtgataaccaacaagcatctgcagaacacgagcatttcagggaccaaattaacagccacagtgaaagcttgccacaatgccttcctgagctaaaccgccagcataatgattccatctctcaaactgcctctggtgataattatcaactgggatcaacagcatattcaagtcctaaggtagaaaacactgatgccactgggatatcggtactcttactccagaagtcaagtagcaataaatggcctgttgtggaaggaaggactctgtctgcaacaaatattctttgttcagaaccctattatacaagggatagtatcagtgctatgaggcgtagctttggacgggatagctcttcagcaacttcttccattgatctagggtcatcaaggcaatcagatgtacgttttgagcgtctcaggagtggcaagaggggtgatttcgagaaggctcgaatgagcagtaccatgagccatcaaagtgttgcttcagtgtcagatatgtcaattagtggttcatcagcttcactttgccctcagagtgatgttattggtgacacttgtttcccaattgacacgctggaaaggagtgcatcgagaacaacagtctctattgaagaacatgacagctcttgtatggatgctttatcaagtggtatggagtgttcatctgctgtgcagccgataatcaatgatgaaatccttgttgacttgaacacctcaggttttcataggttaagtgaaacagaagatatacttattaagaaccataatatggaaatggtggctgacaatgatcatttgagcactaacttgtgtttatcagatattgaaatgccaagtgatgccctagaatcttcagctgctgaggaaagttatataccaaaaactgaggaagatacttccaccaaagcacactgctatacaatcagcaccctagagcatccaagcgatgagaacaactttgatgatcttcaaatgcagtctgaagcagttcagtcttcaaatgaggaaaataaatccaatggctgttgcacgcttgctgtctctgaggatgacgtgttggtttctggaacagatactaacataaaggaacttcctaatgatggtatggtttcatgatttctaaatatgaacttttccatgtcaaatattctacttttctcataacttattaactcatgcttattctgtacttgcataaatcatgcattgctcctctatgttaaagtcttgtctgggaatcatgctttttgtattaaaggatctccggcctcatcttttcacttatgcttatgcttatcagccaaaatttaaattttcaactttaaatttggaattgattttagggtttttttcatcgaaatttatttttcagcctttgcttttaggtcactaagaacacgtatataaaagttttattctcaaattatttttcgtttgcaaatatgcagtttcgctaaacgatggggccgctcctttttttagttctacagaaattatttactctttcaaaccaaagraaaaaatatacagtgaagtaatgcatgtagattgtgtattttctkggataagaggtgctgtacagcagtatatagaagattatgtgtgactttttccatgttaaagataatatttatctcattttgcaacttacctaaaggaacatgcttcatgttattttcgctttatttttcctttggggttatgcacgctggat

SEQ ID NO: 5987 - DNA, 1893 bp, Oryza sativa
  misc_feature (678)..(678): r = adenine or guanine
  misc_feature (810)..(810): s = guanine or cytosine
  misc_feature (816)..(816): m = adenine or cytosine
  misc_feature (827)..(827): m = adenine or cytosine
  misc_feature (834)..(834): s = guanine or cytosine
  misc_feature (854)..(854): y = cytosine or thymine
  misc_feature (860)..(860): y = cytosine or thymine
  misc_feature (865)..(865): w = adenine or thymine
  misc_feature (872)..(872): s = guanine or cytosine
  misc_feature (875)..(875): y = cytosine or thymine
  misc_feature (891)..(891): r = adenine or guanine
  misc_feature (895)..(895): m = adenine or cytosine
  misc_feature (901)..(901): y = cytosine or thymine
  misc_feature (914)..(914): m = adenine or cytosine
  misc_feature (939)..(939): m = adenine or cytosine
attgtttagcaatttgggaaacatgagcgtgaaaaacgaggcaggtgaattgtgaacttaggctaaaaaacacagccatagtcatgggcctacctaaataacatttacatcgacaaattttgcacgatacgagcatatgaattagtaaaccacctctatttccaataaaacatctaaaataacatcatagggtgtttttttacctgtttttttttcaaggcgaaaaataaattaacttcgagcaaggtttaagggttgaaaatatacttcaccctaaaatttatccataccaaagaaagctagcttaagacgtgattgccattaactatataagtttgagacatttcttttatacatttgagaaagggtttgatgtaactaagctgctgaaataacgaaaaaccccacaccctatgtaaggttaatggtttcttgtcgtattagatataatttattaaactttcacgctatatcaattaactgaaacatctagaaccatccgttcaaatataccacggaccaaaatttcttatcaggacacatcatttatttttccgtgacgcaatgatttcttctctttacataaatgttttatcgtacctaaaagcaacgataacgtatccgaaacctggctattttatgtcgcgatgtaattagaacacgaaacatcccaaattrgggcatccagcttagaaaggcatttgtcattttaccgttctgttacaaccttttacctttccacgtaacactcggtttgtcgttgaacccctggatcctcccggaattcaggcaaatcttgtacgcttaagscttaamgccgcggaaamatttggstaaaatcccggtagcagatyaccatytttawattaagsatygcctgaatccccaagraacmccaatyaccagtttaccamtttaccattgccttccaggaacccmaaaaaaaaaaagcttaccaaatggcgtgtatgagtgtatcctcaattcctcaccatgacatcccagccgctcatcaacgtttccatcatccgcgatcgacaaatcctggccgttgatgcgtccagccccctcccccacgaggccctgctgacgtggcgcgaccaaccaccctctcctcccccggccgggggtataaaaggggggtctcctgccacctccgtctcctcagcgctctcctctccatttttttcctcctatcgattttgcaatttagcccctagggaggcagggaatccggctccggtccctgtgccgctccccccggctctccttgcctcccttgctcctccgatcgaggctgaagcggcttcaggtgagccccgtcctggcgattcttgattcgcttggatatacattttgtagcgagttcatcgtctcgatttagatttcgtttgtttttggctggccatggctttggggttgggtggattggaggaggtgaagtgaagtggttcttccaggaggagatttttggtggagattttggtgctgggagcctttgggttggggattgtgagctgtaggaaggtttaaagggagatgcctttggaggaaactgtactgaatttggtgagggtgtaggatgcatagagctatagaaggttggggaatttgctgctcgtaggagcttaggagagctcgaaactttggataatatcacaattgtttaggtgattagttacttgtcgattggttgtgttttgataacatagagtctggttgttggggtgtccagttttaggctaaggtcttgctctactcttactgtattactacaataagtacaagttctgaatgagtactaaattaagctggagttctcctttttagcaggcttttccggatccctgtgaagtgttgtagatatctaacttgcatattgtatcatgcagg

SEQ ID NO: 5988 - DNA, 1998 bp, Oryza sativa
tggcagaatagtctaagcaaaatctgattctaaacgatgaaggctactgaataaatttgattagggatgtcctaaggttagccctagggcatctaccccttggtcttagcccatgacataattacaaggtccaaggccaaatcagacttggtcaggataaggtacgtggcttgttttgcatattcctaacaacttaggagatgaaagtatactccataagctttccaacgagtactcatggactgtgagagttgtagttcctcatcaacatcctaacatagtccatgggcctccgtttgaagttgatgctgtcagaaggcccgaatccgaattcaaaatgtacagaacttaatgtcttgcctcttgtggaccaaaagtgacgtggtgatgtaggagtagactaaggaatgtcacttatttgatcatccattcatcccttgcgttcggtgtctttcccgtcacccaaaaacgtaactctgcaaataagaacacacaaaactcatggtgcaataatatttgttcaaatatataacacataaatcttacatagaatacatgcacctttggttgatatatagataatgtagccatggtcatatccgaactagtgttgtcctcatcacatcacttttgaaggaacctatatgcctagaccatgatgttttacaagacatgcattttttccatgcatttacctaacctcatatctcaaagtggaattcaaccaaatgaagttaaacttgcggcaatggttaaatttcttataacttaggagaaaaatcccaccgtctaaacatgggctaaagtatggctgatgtaatttcccaacgcataaaatggttctatgagaagtgcttcttgctaaggtatatgtccctgaattcattgcagtaaaggctttgtgggatgtctcctacagccaaggctttcctcggctgtaactgtcccatttgttacgtgttttctttgctttctaaaatgaagacatgcaatctacctgaaaacaaattgttctagaagaaagataaataaccgaaactatttggagagcattcaggttacatggttagtccatggtgctagatattgctatataatactcaatgcaatgctcaatagatataagtttcaaagctgtataagaattttaggttagtgtgcaatgtaagtgtagcttcttatagcttagtgctttactatcttcacaagcacatgctatagtattgttccaagatgaaagaataattcatccttgctaccaacttgcatgatattatatttgtgaatatcctatctcttggcttataatgaaatgtgctgctgggttatacctgaccatggtatttgagagacctttgtatagctgaaaccaacgtatatgcgagcatggaacaagagaacaaaatgcaaggatttttttatactggttcatgcccctggatgggttaatatcgtgatcatcaaaaaagatatgcataaaattaaagtaataaatttgctcataagaaaccaaaaccaaaagcacatatgtcctaaacaaactgcattttgtttgtcatgtagcaatacaagagataatatatgacgtggttatgacttattcactttttgtgactccaaaatgtagtaggtctaactgattgtttaaagtgatgtgcttactgtagaagtttcatcccaaaagcaatcactaaagcaacacacaacgtatagtccaccttgcacgtaattctttgtggaagataacaagaaggctcactgaaaaataaaagcaaagaaaaggatatcaaacagaccattgtgcatcccattgatacttgtatgtctatttatctatccaccttttgtgtaccttacttctatctagtgagtcacttcatatgtggacattaacaaactctatcttaacatctagtcgatcactactttacttcactataaaaggaccaacatatatcaccatttctcacaaaagcattgagttcagtcccacaaaaa

SEQ ID NO: 5989 - DNA, 1923 bp, Oryza sativa
  misc_feature (108)..(108): m = adenine or cytosine
atcgccttttcgatcttatggtcccataataattttacatagagttgtgtgctactcattcgtgtattcatacaaataggtccatcatgtgttcatcacattatatcmataacacttgaatttaacataacaatccatcactcataaaatcaatccatcctctataagcattcgaaggaaagacaagtataagtgttgagtgagttggagtgatgatggtccttgtcagattctatcatcgtagtggcataaatgtatgcaatacccaaagtttcaagtgagaaaagaacaaatctcacattttgagcagtggcatatccactgtgtgggttttgtcaaccgtaccactaatagtttttctataccaacactagttaaagactacgatcgaaatcctggtgataactatagctcctaatctaatggtcggttgctcgttactagtccaaagggatatttttttatcagttacgtcttattttcttacaatattactatttatcatttcacttcagaaggggaaaaaaactcgccttcaattttgaaattgtatcacagaaaatgagagtttttatttttccattgtctgttaagaccttgtaaccagctgaatatcatcttgctaggataccgatactcttcttattttttttatcgaaaccactctttgagacctgtgtggccatacacaagattacctagatggtgacaaccgatgtgcgatatttgtccgcacaattcattcacatatatacattctgacatagagtctgcatggattcacgaaaccaaatcaccttccaaaaccgctatgaagtccgttccctctgcttttcacgaaaaccatcttaaaaaccattgactagccgtgaaattcaattaacttttaccaaaactttaaaatctagttaaactcttttttcctagctcgaccaatttactgagcggttttgtgatctcaacccaacaaaaaaacctatttaagtttccgcgaaaaccaagtggtttcgtaataaaccatctgcgcacacgcacagaagcccacaaccttccccgcgcgcgagtaccagcctcgtcgccgggcaacccaaacgtgcccccgcgcgtgcgcgcgcggctccgtgctccgctctccagccacctatctattctagccccttacgttacggccttttacgttactacgtacagctaatctaccagctccgctttccatgaacaccgccaaaaagcccaaaacctcccttgctctttgcagctcatgctctttctttctttgcccgacgccaaattgccaatgcttcgattcacgccttccattccattccatcccagcctcctaacaaccagtagcacattgcttgcatgcctaccttcgaaaatcgcagagcacatgaatgcacctgcccaggaccacggccactgtccgtttcttcctcctcgagaaggagcaactgatcgaactgcgcacgcacgcagtagctagcatcgcatcgcccgtttctgttgcgagaaagaagcaagcaaagcaaagcgaagcgctgatcatgcgcggcacggcgcagcctgcggattcagtggcatcgtgcagccggtattgcagatgagacaagccgggagatggatgccgttggtggagtgcccggcggggagcggggcttgctagctgtgtggggggcttttcgtcgcgaggagtgcacgccaccgtgcaggtggtggacgggacggaatggctataaaatgggggcgccattgccaagaatcccaagaacaccagccaggaatcagaagccagaagcagcaacgctcgctctgattctttctttcctcctcgagctaggtgcgtagttgtcatatttgatcgatcggttttagttcttcttgtttaattttgattgcgcttgtagcagcaggaagtagttt

SEQ ID NO: 5990 - DNA, 1957 bp, Oryza sativa
  misc_feature (193)..(193): y = cytosine or thymine
  misc_feature (1791)..(1791): m = adenine or cytosine
  misc_feature (1793)..(1793): m = adenine or cytosine
  misc_feature (1802)..(1802): r = adenine or guanine
  misc_feature (1810)..(1810): w = adenine or thymine
ccgaagttaaggctgcggcagccagcgccgcttcccatctcactccccgaccgcatcccgccgtcgccgtaggaggaagcggaagcggtgccggcccaaggaggagcggcagctgcgccgttagcgtcggggcgcagaagctaaggctgtggcggccagttccgtcctacaccgacatcgcgctgctcccccytctcccgaccacattccgccgtcgctgtgggaggaagcggatggaagtggcatgaggcagaggaggccgacggcgatggctttgtcaattgggcaaacgggtccttccccgggctgccgaacgtcgtccccaccgccggatgccgacgccgccgactgccgcccctagttccgctgcgccccgatgccgccagccgccgctgccaacgagaagaaagagagaatataggagggagtcattgacaggtgggtcccactttatttttaaaatttatttgatgactggaatgccacgtaggtgccacgtcagcgaaaccgcccttcaaaaccgttgagtgagtcaaattgtactggttttaagagtttgagggtcgagatatctggttttgtggtttaggatcacgaattagatttcgatcacttttgagggtcacgaagtgaacttattccttcttgatgggtctgacggtttgggcccgtttggttatgggcctagttgagcgatcattttgagttgggcttagcatgggccgtcattgtacttgggctgctagagcaaaagctatcataaacatttttgtcatttagcaattttagtactccttttcttttttgaaacggcaagataaatgtcatgaatgcgagaagattaaaacggctaatgccagctgcatgccggatttcaaagccagaaaaaaatttgaacgaatacatgctttggattccatcaatgtgtttgtacacatgaccttttttttttcatcaaatgaaaagttcaaaacaaatatgaaaagtagacggaagaaaacaaaaaggaaaaaaagaaaggaagagatgctctgctgctctggtgggacccacctcaggggaggggatcagcttgactcaccctgacacgtcctgactcgccaaccgcctctgcctccaagtgcgtgctaatcctaatctctctctcgtcattagcagcgctaattaacccaaagtacataagattagcagtaatccgtaattagtggagtaattaatcaccaagcaatggcgctggcttggcttggcttggcttggcccgcgcgcgaagaagaagattcgttcaacgatcggacggccatccggaaagcaaggagaaaaatggagggacaggatcgctgcttaattagctggcaattgctttcttcgccgctacgtatcatgcatggacaatgcatgtgcttgtgcttccccttggtttaattctcgcttcgcttttttactcctccctttggtttactcacaaactttttttcaaaaaagaaaaatcttgatggttaggagtatttaagatacttggtgatttttttcatacatggtataatactataatttggatatggagaactcatacacactacgctttgtgccaaatacaataaaaatgagacgatctagatcatgttgtttatagtacgtaaatagaagagatagatatgtcaagttatgatgtttgtatatagaggaggaaagtatatgatatatttatcctacacattgtttccttctcgctttacacgttagtattttggttcgctcgcacctttttctatcttaattattacttattcmamacattgtcracgtggtwatgtatgtataccgtttattagaaaagcataccgacaatgtagcgttctcgatatattttccagcattgtttctttccgcctttttacgtaaggtattttcgaaaacaaattatacacaatcaacaacatatgtgtcgtttatcgcg

SEQ ID NO: 5991 - DNA, 1364 bp, Oryza sativa; identical to SEQ ID NO: 5942

SEQ ID NO: 5992 - DNA, 1491 bp, Oryza sativa
atggcaagtaatgcaacaaggaatactgatcctgaccaacagggtgttcgattcagttccatggaccagcctccatgttttgcaagacctggtcaatcgttccctgcttttcctccactctttggggttcagtcttccagcttgtatttacctgatgacattgaagctaaaatcggtaaccagttcgaatcaaatccttccccgaataatcctacaatggattgggaccctcaggcaatgctgagcaacttatccttccttgagcagaagatcaagcaggtaaaagacatcgtgcagtctatgagtaatcgtgagagccaagttgctggtggttccagcgaggcacaagcaaagcagcagcttgtcactgctgatctcacttgtattataattcagcttatttcaacagctgaacccaatcagcagcaaccgggactcagacatctcagtaacacactttgtgctcctatgatcctgggcaccaattgtaacctgcgaccaagcgcaaacgacgaagccacaattcctgacattagcaagacccatgactatgaggagctgatgaatagccttaatactactcaggcagaaagcgatgagatgatgaactgccaaaatccttgtggtggggaagggtcagaaccgattccaatggaagaccatgatgtgaaggagagtgatgatggtggtgagagagagaatctcccccctgggtcttatgtagtattgcaattagagaaggaggagattttagcaccacatactcacttctgcttgatctgtggcaagggttttaaaagagatgctaatcttaggatgcacatgaggggccatggagacgagtacaaaactgctgcagctcttgcgaaaccttcgaaagattctagcttagagtctgcaccagttacaaggtactcgtgcccatatgttggctgcaagcggaacaaagagcacaagaagttccagcctctcaagacaatcctgtgtgtgaagaaccactacaagagaagccactgtgacaagagctacacctgcagccgttgcaacaccaagaagttctcagttatcgcggacttgaagactcatgaaaagcactgtggccgcgacaagtggctatgctcgtgtggaactaccttctcaagaaaagacaagttatttgggcatgttgctcttttccaagggcacacgcctgcactccctatggatgatatcaaagtaacaggagcatcagagcaacctcaaggcagcgaggcgatgaacaccatggtggggagcgctgggtataacttccccggtagctcatcggacgacatcccaaatcttgacatgaagatggctgatgatccacgctatttctcgccattgagctttgatccttgcttcggtgggcttgatgacttcactcgacctggatttgacatctctgagaatcccttctccttcttgccctcaggatcatgcagcttcgggcagcagaacggagacagctga

SEQ ID NO: 5993 - DNA, 239 bp, Oryza sativa
atgaagcgccctcacgcaccggcaccgagcaggtcgcacgctcgtcccgctgccgtccacattgataacgcatccgtccagtccaacgactgctaccgccggggccgggaccgaaggggcatctggccgggtgcagcggccgacaagtgtaccgcgcaagtgcttttcgcacgggagaacgcacgggatttgggtggtaactgctggatcgggccaatccgcggtcggatttagaataa

SEQ ID NO: 5994 - DNA, 1599 bp, Oryza sativa
atggcgggatcgcagctcaacgttttggtcaagctcgaccaggccaagacgcaatggtaccatttcatggcgatcgtcatcgccgggatggggttcttcacagacgcctacgacctcttttgcatcgcgctggtcaccaagctgttgggtcgcctttactacaccgacatcaccaagcccaacccagggacactcccgcccaacgtgtcgtccgccgtcaccggcgtcgcgctctgcggcacgctcgccggccagctcttcttcggatggctcggcgacaagctcggccgcaagagcgtctatggaatggtcgtgtgctccatcgcctccggtctctcgtttggccacacgcccaagagcgtgattgccacgctctgcttcttccgcttctggctcggcttcggcatcggcggcgactacccgctcagcgccaccatcatgtcggagtacgcgagcaagaagacccgcggggccttcatcgccgccgtgttcgccatgcaggggttcgggatcctcttcggcgccatcgtcgcgctcgtcgtctcggccggcttccgtcacgcgtacccggcgccgtcgtacgcccagaaccccgccgcgtcgctcgcgccgcaggctgactacacgtggcggctcatcctcatgttcggcaccatcccggctgggctcacctactactggcgcatgaaaatgcccgagacggcgcggtacacggcgctcgtcgcccgcaacgccaagcaggcggcggctgacatgtccaaggtgctccacgccgagatcgaggagcggccggaggtggtcgagagccaggtggtcgccggggagacctggggcctcttctcacggcagttcatgaagcgccacgggatgcacctcctggcgaccaccagcacgtggttcctgctcgacatcgccttctacagccagaacctgttccagaaggacatcttcagcaaggtcgggtggataccgccggcgaagaccatgaacgcgctcgaggaactctaccgcatctcccgcgcccaggcactcatcgcactctgcggaaccatcccgggctactggttcaccgtcgccttcatcgacatcgtcggcaggttctggatccagatcatgggcttcttcatgatgaccgtgttcatgctcgcgctcggcgtgccctacgaccactggacgcacccggcgcaccacaccggcttcgtcgtgctctacgcactcaccttcttcttcgccaacttcgggcccaacagcaccaccttcatcgtgccggctgagatcttcccggcgaggctccggtcgacgtgccacggcatctccgccgcgtccggcaaggccggcgcgatcatcggcgcgttcgggttcctgtacgctgcgcaggaccagcacaatcccgacgcgggatactcccgcggcatcggcatccggaacgcgctcttcgtgctcgccggcacaaacttcctcggtatgctcatgacgctgctggtgccggagtccaagggcttgtcgctggaggagatgtccaaggacaacgtcgtcgacgagaccgcccaagaagcgatcgcccaagcgtgatgtcataaacatgccgtctcgacgtga

SEQ ID NO: 5995 - DNA, 1719 bp, Oryza sativa
atgtctcaatcttcccctttcttctccgttgcccgagcacatgctggagcaggagggcgagctgcggctgccgctctcctgctccgtcaccctgttgctcagctgccacctcggattcatggcctgaggtactacccttcagccattgtgtcacctgccaagacactgaactcacacctgagccttccccatgccacaatatcctcctttgccaatgctgataatggctccagcgggcaagcagatgccacagagtctgaggaggagcagaacggggaatctgaactgtcggagatggccaaggcattccatatatcgccccggatggcaatgtcaatctcagtggtgattgcatttgcagcgctcactgtgccactggcgatgcagtcagtggtcttccatgggacgaacaaaatgaaggcactggcatatctgacactgctttcagggttctacatggcatggaacattggggcaaatgatgtggccaatgccatggggacgtcagtagggtctggtgctttgacactccggcaagcagtgcttactgcggcggtgctagagttctctggtgcattccttatgggcacccatgtcaccagcaccatgcagaagggcatcctagtcgcatctgtcttccaaggaaaggactctctgctcttcgctggattgttgtcatccctcgctgctgctggaacatggttgcaggttgcttcctcctacggctggcctgtttcaactacacattgtattgtcggggccatggttggttttgggatagtatttggaggcgtaaatgcagtgttctggagctccttggcaagagtatcttcatcatgggtcatttcaccattgatgggtgctgcagtctcatttattgtttacaagggtatacgaaggttcgtatatagtgcaccaaatccaggtcaggctgcagctgctgctgcaccaattgcagtttttactggtgttactgcaatatcatttgccgcttttcctctcagcaagactttttcaatcgctatcctgcaagcattagcatgtggcgcaataggagccgtaatcgttaacagagtgatccaaaaacagcttggtgacctactgtcctcagaagcagaaaagatagcatctgctgataaggcaaatgctcagcaagttggatttctttcggacatagctggaccaacaggagctcaattgcagattgtatatggtgtatttggatacatgcaggtcttgtcagcatgcttcatgtcatttgctcatggaggcaatgatgtctccaatgccataggccccctggcggcagctttgtccattcttcaaggtgtagcaagcagtgctgagatagtcatacctactgaagtccttgcttggggaggttttggaattgttgcagggcttacaatgtggggttacagggtcatagcaacaattggcaagaaaatcaccgaactaacaccaactagaggttttgcagcagagtttgcagcagcttctgtagtattgtttgcatcaaaacttggattgccaatatctgctacacatacacttgttggtgcagtgatgggagtgggatttgcaagagggctcaatagggtcagagcagagacagtgcgtgaaattgtggcctcctggttagtcacaattccagttggtgctgtgttatctatcttctacacattgctcttcacaaagattctggcatactttatgtga

SEQ ID NO: 5996 - DNA, 733 bp, Oryza sativa; identical to SEQ ID NO: 5974

SEQ ID NO: 5997 - DNA, 1999 bp, Oryza sativa
catcaggagtgatccctgttacttggtgccaccactttctctgctaagtgattctttatttgtgataatttaaaattaaaatacaaaacactatttttttactacaagaaatatgtagatgcatgcacagaaaaacaatcacagttgcctagccatatgaactaaaattttagcatatcactacttataacaaaagtacgttggcacatatatatatatgaggaggcgtttccagtagaaattttgattgggtcatagatttgttgttagactcttttctttgagcgtcgtgaattggagtaggaatttacatatgttgtgattttctttggaattaaagtggattacttttaaagtttgattttaaagaataattttagatagacttttatatgtgttctaagaaattattaaaatagaactagacaaacaaagtggtaaagaaaacccttgaaataaatttagaattaagtcaacttcgattatatatattcgtagttcaaccagcattcatcatgcaataaagtaatgattttatttataccctgagtaagttttttttaaaataatttatcacccatataaaggaggcaattctcgctctcactaacatattgaactatttttgtcactaaatgtggactgggatagcaaattgtatccaacttaagaatgtcatattaccaaatgtcccagttataaaataataattatatttacacaccatgactttgtaaaataaaatactgtaccttttttttaagatgacttgtcattttcttttcatgcagccttattagattatgttgtactatcaaccaaaactaatgtcttgccttgtactgtttccacgttcatggctgatggcctcatgggccaatgaccttgggggttgctaaaagtcagaggagcctgatcccaatatctcatattcccagggacccctccgtaaatttgtgtttttgcccacgaagaaataggaaatcgtctcgccgttcgccaccacggtgactcgactagtatttcccctcgctcgccgtcgactcctccgctcgccgccgccgccgccctcgccgtcgccgtggcctccgccgatccgatcccaatccatcccggcgaccgcgagcagggcgcggggcttcgtcgttcgtcctgctgattccgccgcatcgcgtcgcggtatagcatccgatcctctttttctcatctttttccccccagtttgcgttagccctttggtcatttctctgcgtcatagacatggaggaagtttttttctctcttgatttgctttaaccttgatatattaataaaaagttttttttgttccacccaaaaagtttgggggattcaactgaatcccctcatgtcccatgttagatccgatccttctttgttagcaatagcatatatcaagctggttgaattagtggagagatgatgatgatgatgagctgagagttagttccgagttctgactagtcagcttggtttgttggttggttgttctacttgttgataggcttttctccctgtgtattaattatcttctcgcttgcttccagaaatatttttttattaaaaaggtttgggttttctactagagataggcttaaaaaatatgttttccttagttttttttcctcgctcttttgggctagaaatgtccatctatttatgggagtattcatggttaatttcatcctgtcagcgacatggaagaaaaccagaaaatcagcagtggcttctttccaactacgacctgtttaattgattggtctcgaactgttggttgttgctgcgttcagtttggtgttctaacaatctttatcatgcatcccaggttttcatgactgccctatagatcagctcctgattggaaggactgtagttccatgagatagaagggcatattgaagtagaatttggcctttggtgaatctaaatggacagtggcttgggaagaagttcagagacatccttgaaagccttgccatca

SEQ ID NO: 5998 - DNA, 1998 bp, Oryza sativa; identical to SEQ ID NO: 5976
  misc_feature (321)..(321): n = any nucleotide
  misc_feature (329)..(330): n = any nucleotide
  misc_feature (345)..(345): n = any nucleotide
  misc_feature (349)..(349): n = any nucleotide
  misc_feature (370)..(370): n = any nucleotide
  misc_feature (444)..(444): n = any nucleotide
  misc_feature (449)..(449): n = any nucleotide
  misc_feature (451)..(452): n = any nucleotide
  misc_feature (461)..(461): n = any nucleotide
  misc_feature (466)..(466): n = any nucleotide
  misc_feature (494)..(494): n = any nucleotide
  misc_feature (496)..(496): n = any nucleotide
  misc_feature (509)..(509): n = any nucleotide
  misc_feature (515)..(515): n = any nucleotide
  misc_feature (517)..(517): s = guanine or cytosine
  misc_feature (526)..(526): n = any nucleotide
  misc_feature (528)..(528): n = any nucleotide

SEQ ID NO: 5999 - DNA, 1740 bp, Oryza sativa
  misc_feature (54)..(54): s = guanine or cytosine
cacaggtacaatttttctaatttagatctcttttcccaagtttttgagtttttstttttcccaccatcgttcgattagtagttgaactgttgaagacaccaaatgacatcagcaggcaattgccaagattttattctggaacttcccggatgtttcctctgttttatattatactccctccatctacttttgatagtcatatttccaaatctaaaaaatttatttttgatagtcatatttcaatccaacaacctattctcttaatgactttcttggatttaatgcatgactccccattcttccacgcatgattggctacatgggcattgagaaatgttaatattaatgaatcgtttgtttacgagaaatgactagtagcatgtttaaatgaatgataagtagaattacttatccttggtctgcgtggcaagatgaaatatgactatcaaaagtagatggagggagtatgtcgtttgatctttttctaattaaacttcaggcttgttcagattgatgctatttcaaaccataccattttttatagagttgtcaaatatgtgtatctatttagtttcttgctaaattttgataaatacataagaaatcgtaccaaaattttagtaatattgtcaaactaccaaaattttaaatttatcttggctacaatctgaacagcccttctttaagtttgactaagtttaaagaaaaatatagtactattttaaacacaaaacaaacatattatgaaaatataaaatgtattcaatgttaaactagttaagtattttagatgttgctaatctttttataaatttgatcaaacttatcaaagtttaactagagaaaaggctaaacgacttataatatgttataatatgaaatcggaaactgatggtgtaggacttaaccaaatgatcactgctcaagaccaagaccctatttgcatgcatagctttgtcactgcccagccgatcctgacaccgtagaattctaaacagtgggaggccatacgctgatatgcatagatagttgaaagttaatttcacattccacgatcctgcaaatagaataacatttgacttctgtacgggcattttaaagacaatatatgtcactatctgcttgcaatctacagtatgtacggtacatgcaatgcagtagaaagaaaatcttttttctgcaaccatgccctgtctgtatcctgtccggactgcgctgcggctatatatacagcaccatggcaacagagatgaggaaactaacagagcacacagcgatcccctctgctctctctccggagtcaacccatcctcaatcttcccaaggtacgcaaccctctctcctgcatctgagttccatgttagcagagatgctagattaattagtgttgcggtttagcatattcaggaaacgttctactgaatatttgttgaatcatatgcgtaatattattacccgccaataagattagttgtgtaaacatgtgcttctactatttagtacagtacgcattaaaaatggacacacccctatctattgaagtttcaattactgagcggtaaatcatgaattctcaatctcaacagtgcgaaacctgaaatttctctgttcaattaacattcaacgatctagtcagatataaatggagatgcctaggtgaagaattttctattcttttgtgatatgttgtctgtactaagcaaagcttataactttgcagcttgaggaaaaaagatcatc

SEQ ID NO: 6000 - DNA, 2059 bp, Oryza sativa
  misc_feature (316)..(316): r = adenine or guanine
  misc_feature (1192)..(1192): k = guanine or thymine
tcattggctatttgcgttaccttccaaaacaaggagtacctatgcatctttcgaaagatttctatgatcatatcatataaatttttaatctttggattaaaatccaatagacatagtaaaaggcaaaaagcaactaagaaacaccataatagatactaaattaccatatctttaagaaaaagaccaaatccaatataaatttcaaaacttacatgcgaagattcaaaaattacactgtaagtttcataaattacactataatttacaagaaaatacactgtaaatttgagtgagaaaatcgagtgagagataaagraaaaatctttcaagtgagatatagcaaaatcgcagaacaattcgagtccaagattattattcattaaatggacttcactgagtcatttcttgtgaagggatttcactatgttattttgatcataaatctagagttaccacttttactccccataatttgattagactttcaaggaaatattgtacgtcaaaatttgatatctcaaaatcaaaccgataaataaacatggtttgcttaaaatataacaccacatttttcacgtaatttcaatcatttttttcctatgttattgcgctctctcccctatatatataagtatgcttctatctctcctgtttgcggccgtcgaacttgcaaatggctcagtggtgccctgcaatttggtcgagttacaaatctccatttggagctacaagtatactactactcagtatctttgtttttaagttatcgtacaaattcagaagcaacaccaaactgaaatcacaggaagattcttatacctaactacagattcgaaagtgaagtcggcaaaaggagaatcagccataagaaatcttgaaactgtgcacgctttaaagacacaatacttcatccacaacacacgacttgcagggaaaaaaaaatgtcgacctgagccctggccaactcgatgagcagaaaatgtgtctagtgcggtgtctgctaaatgataaattgtggccaatctctagtgatcgtagaagacaagatcaagtattccatacctgataaattgtggccaatctctagtgatcgtagaagacaagatcaagtattccaaacctgatacagggacaaagacgctgattattcttctcttcagcatccggcctggagcacacaagttgatttcckgttctgtggtccttggccagcagcgctccaatcgctactgccaaacgggaaccaccggtccatctcaccaacaaaaagaaacacgaagcaaacgcataagcatgcttacaatcttattcttggaccacagctgcgttcacttgttaaacatttattagtcgaacaagaggaaatatgcataccctgatacccatgagaagccagaccagtgttgacttcctctgcaattaaatagatttctgagcatggaaaatcttgattactaacaccgactgtatatctgaagagtcaccgtttgtgtgtcataagaacagtacgtttttctgtcataagaacagtacatataacatgagaacttcacatgtaactgtattagtttcatttatctgcacagtagatggcatcagctttagaaccacagacgcaagtatcttcagaagccttccatattaaactgatgcaagatgttaatgtcatgctaaatattgcactggagaatcaaaacaacagaaacagacaacagttagatctttaaaaaagacgatggagggaagggtggccctgatggtaacgcagactgaaaacagtcaagtggtcagctgcaaccccaggttatggattaggctggaatcttgctcgtatccccttccaccactcattccaagccaccactcgttcatctcagcccgagctgggccaccacagaaagcaagccctttcctccatccacaaaacaatgctcacttcattccacaaacacctatggccaccgcttctcattcaccttcctcctctcctcccccttaatctcatctttttcttctcggtgcttctctgctcaaacctgtactttgcttctgccacttc

SEQ ID NO: 6001 - DNA, 1955 bp, Oryza sativa
  misc_feature (396)..(396): y = cytosine or thymine
  misc_feature (399)..(399): w = adenine or thymine
  misc_feature (1368)..(1368): y = cytosine or thymine
  misc_feature (1687)..(1687): k = guanine or thymine
ccctactttgagcgttttaatggatgatactactagttctggatcaaattggctagatgtttgtttcactgttcaagatattgttaataacctgcttgcagtatcacagatagacaaacttaggcttatttcggagctgcttggctgagctgcggaaaacacagcgggtgattattagtgcataatgaactaagtattaattattgctccctccatcccaaattataaggctcaaacactcctatcgcaattaccaagaatgaatttaatcacctcctcgattggatcacatccatacatgcaagcaatgtgattggggggcttgatggtagctgatttaaaacaaaccaaatataaaggaccaagaggtgctagttaatgcattcatgcatgccytawaattttgagacatgagaaaaaaagtggttgcgccttatagtttgggatggaggagtataaattttaaaaaatggatttatttgatttgttaaagaaacttctatatagacttatttttttttaaaaaaaacatgcaccatttagcagtttgggaagtatgatcacactaaacgagggagtagctcactccaacagtcgggaagaacaggggcttagagaagcagtgacatgtcttatttaatacatgtatttatctgtggaagtttagcagcctactgtgagcatacgcaatctttagtacctcctgtagactgtagttagtgttaatctcacaaagcttattctaacattctaaaattatgcacgctaattatctcttcaccctgtggtttcacgggtgataagcagaactatacaaagtttatatgcacacatgcacacccctttcaaagtttcatacctataaattcattgtgacagaaagggtcttcttaagtgaaacatcacacgaggtgggaacagtggtagatgatgactagaaagataagggagggccagataatgaacaaaattaacagtgtttagagagtattctcttttggtacatatcttctagttgcagtgtcatacacttgattcttcctaggttctctaacttgtcctaaattagcagtatttcgcaaaagataagagaaggcatacccgaacagaaagctctacagaaggtcattaatgcataagtggatgattaagcattaaaacataataaatcgagaagtcagtaggaaactccccaactatcatcctaaaaaaacataagttaagaagtgccacatataggtattaatattcacaaccctggtgcttgttatgctaccaacatgttatatggttttgtatttttctccttcctcaaaagcatcccatctctttatgcaattctatgttatgttttgctttgccttttcyctgaaggtggtccatttcttaaactccaccttgcacctgctctttctttccttttttttttcttcaaagctaactacctaataccattgcatccaggaattcagctgggatctggacaaaatccttttaaaagcttgctcgttttaacgtctttattcagtattgttctcttgtgtagattgtggtatagctccctccctaaacatgtcaatttatcagttgatggttcccgaaccgtgaaccaccacatgtgtaggattaaacttgtgctgttgacctagctagaaccctataatttagggacaatggctcatctctkgttacctatatatagctagttattatgtttctctgaatcaactttcatcagaaccactcctctttgtcgttgcaatattgaccttttgtttatcaatatgcaagtctactaccatgtaaattgccaagttctacatgtgtcacattatgcatcacatagcgattacaataacttaacatttgtttttcttaatctgattttcaggtagaggtgatgataaatcatagttagtgacttagcttgcagcagttctttcttgcagctaaga

SEQ ID NO: 6002 - DNA, 46 bp, Artificial Sequence
  Primer
tacaaaaaagcaggctcaaattttgggtcatggattagtttcacgc

SEQ ID NO: 6003 - DNA, 48 bp, Artificial Sequence
  Primer
tacaagaaagctgggtcttctcctatctgcataaaatggtatttcaca

SEQ ID NO: 6004 - DNA, 44 bp, Artificial Sequence
  Primer
tacaaaaaagcaggctcaagccgctttcacttgacggaacttgc

SEQ ID NO: 6005 - DNA, 48 bp, Artificial Sequence
  Primer
tacaagaaagctgggtggcttatttgcaccggtataaagttagggatc

SEQ ID NO: 6006 - DNA, 40 bp, Artificial Sequence
  Primer
tacaaaaaagcaggctaggcaacccacccttcggtggttg

SEQ ID NO: 6007 - DNA, 51 bp, Artificial Sequence
  Primer
tacaagaaagctgggtccacgatgcagaataaaggcataaattcagaagca

SEQ ID NO: 6008 - DNA, 47 bp, Artificial Sequence
  Primer
tacaaaaaagcaggctggcaccttcaagtaccagtttccttgaaatg

SEQ ID NO: 6009 - DNA, 44 bp, Artificial Sequence
  Primer
tacaagaaagctgggtatccaaactactctccgcgaagtgtgtg

SEQ ID NO: 6010 - DNA, 47 bp, Artificial Sequence
  Primer
tacaaaaaagcaggctgcaacgaatttaatggtgcaatcggatcatg

SEQ ID NO: 6011 - DNA, 40 bp, Artificial Sequence
  Primer
tacaagaaagctgggtcgcagaggcttatatagaggggag

SEQ ID NO: 6012 - DNA, 47 bp, Artificial Sequence
  Primer
tacaaaaaagcaggctgctctagctttagtcccggtttggtaacacc

SEQ ID NO: 6013 - DNA, 46 bp, Artificial Sequence
  Primer
tacaagaaagctgggtcttgcttcctcttctctctcctctccgatg

SEQ ID NO: 6014 - DNA, 46 bp, Artificial Sequence
  Primer
tacaaaaaagcaggctgtcgacgttacatgaggaactttcttgtgc

SEQ ID NO: 6015 - DNA, 40 bp, Artificial Sequence
  Primer
tacaagaaagctgggtcctcgggtgttttggtttggagag

SEQ ID NO: 6016 - DNA, 46 bp, Artificial Sequence
  Primer
tacaaaaaagcaggctcaggccatacagctctatcgcctcagccag

SEQ ID NO: 6017 - DNA, 48 bp, Artificial Sequence
  Primer
tacaagaaagctgggtcacacacacacacacaaaggcccatcaggccc

SEQ ID NO: 6018 - DNA, 48 bp, Artificial Sequence
  Primer
tacaaaaaagcaggctgcatcctcaacatactgaaacaatgtactaac

SEQ ID NO: 6019 - DNA, 36 bp, Artificial Sequence
  Primer
tacaagaaagctgggtgtggaggagcacgcagagga

SEQ ID NO: 6020 - DNA, 48 bp, Artificial Sequence
  Primer
tacaaaaaagcaggctatgccagccaaattgccggccaaagtgccaac

SEQ ID NO: 6021 - DNA, 39 bp, Artificial Sequence
  Primer
tacaagaaagctgggttgccggccggtgggctggtgcct

SEQ ID NO: 6022 - DNA, 49 bp, Artificial Sequence
  Primer
tacaaaaaagcaggctccaatatggatacaatccgagtagtccttgtcg

SEQ ID NO: 6023 - DNA, 43 bp, Artificial Sequence
  Primer
tacaagaaagctgggtcgtccatctttccttgctcctctcact

SEQ ID NO: 6024 - DNA, 41 bp, Artificial Sequence
  Primer
tacaaaaaagcaggctcgagcaggtatcgagcattgccgtc

SEQ ID NO: 6025 - DNA, 47 bp, Artificial Sequence
  Primer
tacaagaaagctgggttgtcacccaccccaatcaagctaagctatct

SEQ ID NO: 6026 - DNA, 41 bp, Artificial Sequence
  Primer
tacaaaaaagcaggctatgtgtaacacgcatggtgtgatgg

SEQ ID NO: 6027 - DNA, 41 bp, Artificial Sequence
  Primer
tacaagaaagctgggtgttggatgaggagaaggatggatgg

SEQ ID NO: 6028 - DNA, 45 bp, Artificial Sequence
  Primer
tacaaaaaagcaggctgtgctgtaatagcttgcctttgctaaatc

SEQ ID NO: 6029 - DNA, 47 bp, Artificial Sequence
  Primer
tacaagaaagctgggtgcttagtagtagtaattgttattgtctccgg

SEQ ID NO: 6030 - DNA, 41 bp, Artificial Sequence
  Primer
tacaaaaaagcaggctagcatcaagaaccagtgaacgatgg

SEQ ID NO: 6031 - DNA, 41 bp, Artificial Sequence
  Primer
tacaagaaagctgggttaagggggtgtttggatatagggtg

SEQ ID NO: 6032 - DNA, 41 bp, Artificial Sequence
  Primer
tacaaaaaagcaggctgaactctggtcgtcatcaccacacc

SEQ ID NO: 6033 - DNA, 41 bp, Artificial Sequence
  Primer
tacaagaaagctgggtttggagagctcgagagagagggttg

SEQ ID NO: 6034 - DNA, 41 bp, Artificial Sequence
  Primer
tacaaaaaagcaggctgcgcaaaacggtataggtctgaacg

SEQ ID NO: 6035 - DNA, 41 bp, Artificial Sequence
  Primer
tacaagaaagctgggtagagactggtagtagcagggggtgg

SEQ ID NO: 6036 - DNA, 48 bp, Artificial Sequence
  Primer
tacaaaaaagcaggctcgcatatcttattgctccgtagttcgtatgag

SEQ ID NO: 6037 - DNA, 34 bp, Artificial Sequence
  Primer
tacaagaaagctgggtctgctcggcgaggcaggg

SEQ ID NO: 6038 - DNA, 41 bp, Artificial Sequence
  Primer
tacaaaaaagcaggctacgatcagactcctaattgccgctc

SEQ ID NO: 6039 - DNA, 36 bp, Artificial Sequence
  Primer
tacaagaaagctgggtcattgcggccaaagcaaagc

SEQ ID NO: 6040 - DNA, 41 bp, Artificial Sequence
  Primer
tacaaaaaagcaggctctcggaacacgaaaaccaactcaac

SEQ ID NO: 6041 - DNA, 41 bp, Artificial Sequence
  Primer
tacaagaaagctgggtttccgatctcttcccatttccattc

SEQ ID NO: 6042 - DNA, 42 bp, Artificial Sequence
  Primer
tacaaaaaagcaggctggcataggattatgaatggatggtgc

SEQ ID NO: 6043 - DNA, 37 bp, Artificial Sequence
  Primer
tacaagaaagctgggtcatccttagatgcgcggccag

SEQ ID NO: 6044 - DNA, 49 bp, Artificial Sequence
  Primer
tacaaaaaagcaggctggagcatgtactctttataactaactttacatg

SEQ ID NO: 6045 - DNA, 34 bp, Artificial Sequence
  Primer
tacaagaaagctgggtgcggcccgatgcgatcgg

SEQ ID NO: 6046 - DNA, 47 bp, Artificial Sequence
  Primer
tacaaaaaagcaggctgtgatatacgcataaggaattatttcctccg

SEQ ID NO: 6047 - DNA, 37 bp, Artificial Sequence
  Primer
tacaagaaagctgggtgagcacgtggtgcgagggaag

SEQ ID NO: 6048 - DNA, 41 bp, Artificial Sequence
  Primer
tacaaaaaagcaggctttcgaaatcgtgcattcaacaaagc

SEQ ID NO: 6049 - DNA, 41 bp, Artificial Sequence
  Primer
tacaagaaagctgggtgctagcaagggagaggtagcggaag

SEQ ID NO: 6050 - DNA, 40 bp, Artificial Sequence
  Primer
tacaaaaaagcaggctctgtcaccgtcttgacccgacttc

SEQ ID NO: 6051 - DNA, 41 bp, Artificial Sequence
  Primer
tacaagaaagctgggtgcgaactagatggcgagatttggtc

SEQ ID NO: 6052 - DNA, 41 bp, Artificial Sequence
  Primer
tacaaaaaagcaggctgtacccatgccttgcaacaatgtcc

SEQ ID NO: 6053 - DNA, 40 bp, Artificial Sequence
  Primer
tacaagaaagctgggtaagtcgcgccacattgctgtcatc

SEQ ID NO: 6054 - DNA, 41 bp, Artificial Sequence
  Primer
tacaaaaaagcaggctgcaaggtggacaatgtgtggagttc

SEQ ID NO: 6055 - DNA, 43 bp, Artificial Sequence
  Primer
tacaagaaagctgggtcagaagaggagtgatggagaagaaggc

SEQ ID NO: 6056 - DNA, 41 bp, Artificial Sequence
  Primer
tacaaaaaagcaggctgggacccatagtcactgggtgtttg

SEQ ID NO: 6057 - DNA, 37 bp, Artificial Sequence
  Primer
tacaagaaagctgggtgcagtcccctcctcttgcagc

SEQ ID NO: 6058 - DNA, 41 bp, Artificial Sequence
  Primer
tacaaaaaagcaggcttggaggaacgaagcagtagcacaag

SEQ ID NO: 6059 - DNA, 41 bp, Artificial Sequence
  Primer
tacaagaaagctgggttgtcacccaccccaatcaagctaag

SEQ ID NO: 6060 - DNA, 38 bp, Artificial Sequence
  Primer
tacaaaaaagcaggctcaagctcaccggcgtcgtactc

SEQ ID NO: 6061 - DNA, 38 bp, Artificial Sequence
  Primer
tacaagaaagctgggtccaccgccatcgactcctactg

SEQ ID NO: 6062 - DNA, 42 bp, Artificial Sequence
  Primer
tacaaaaaagcaggctcccgtcagtttaaatataggcacccg

SEQ ID NO: 6063 - DNA, 38 bp, Artificial Sequence
  Primer
tacaagaaagctgggtgccaggggcaagggtaggagag

SEQ ID NO: 6064 - DNA, 39 bp, Artificial Sequence
  Primer
tacaaaaaagcaggctctccaatcctcgtcaatcccatc

SEQ ID NO: 6065 - DNA, 36 bp, Artificial Sequence
  Primer
tacaagaaagctgggtgttggactgacatgtggggc

SEQ ID NO: 6066 - DNA, 45 bp, Artificial Sequence
  Primer
tacaaaaaagcaggctgtacatgtacctgcatcagaatctagttc

SEQ ID NO: 6067 - DNA, 40 bp, Artificial Sequence
  Primer
tacaagaaagctgggtgccacgtacgttacgatcagtaac

SEQ ID NO: 6068 - DNA, 24 bp, Artificial Sequence
  Primer
cacccggagaagctcacgcccttg

SEQ ID NO: 6069 - DNA, 22 bp, Artificial Sequence
  Primer
gtatgttcgccgtggccatttg

SEQ ID NO: 6070 - DNA, 27 bp, Artificial Sequence
  Primer
cacccttgcgtgcaatgatagatggtg

SEQ ID NO: 6071 - DNA, 21 bp, Artificial Sequence
  Primer
gaaatcgaaccggacccgaac

SEQ ID NO: 6072 - DNA, 26 bp, Artificial Sequence
  Primer
caccagacactgcagagatcctcttg

SEQ ID NO: 6073 - DNA, 26 bp, Artificial Sequence
  Primer
ccatgagatagatgtggatgaggtcc

SEQ ID NO: 6074 - DNA, 27 bp, Artificial Sequence
  Primer
caccagacgagtctagtgtccatatag

SEQ ID NO: 6075 - DNA, 26 bp, Artificial Sequence
  Primer
cacccatcacaagccaatgcagaagc

SEQ ID NO: 6076 - DNA, 26 bp, Artificial Sequence
  Primer
cacctccggtgtacttcgagatagtc

SEQ ID NO: 6077 - DNA, 26 bp, Artificial Sequence
  Primer
gacaaaggagtaggatcaatgcatgc
